(19) United States
(12) Patent Application Publication
(10) Pub. No.: US 2012/0003720 A1
(43) Pub. Date: Jan. 5, 2012

(54) NUCLEIC ACID DERIVED FROM HEPATITIS C VIRUS AND EXPRESSION VECTOR, TRANSFORMED CELL, AND HEPATITIS C VIRUS PARTICLES EACH PREPARED BY USING THE SAME

(76) Inventors: Takaji Wakita, Tokyo (JP); Tomoko Date, Kanagawa (JP); Hitoshi Takahashi, Kanagawa (JP)

(21) Appl. No.: 13/142,227

(22) PCT Filed: Dec. 25, 2009
(86) PCT No.: PCT/JP2009/071644

§ 371 Date: Jun. 24, 2011

(30) Foreign Application Priority Data
Dec. 26, 2008 (JP) 2008-335016

(51) Int. Cl. C12N 7/00; C07K 16/10; C12N 5/10; C12N 15/51; C12N 15/85

(52) U.S. Cl. 435/235.1; 536/23.72; 435/320.1; 435/370; 435/367; 435/369; 530/389.4

(57) ABSTRACT

The present invention provides a nucleic acid comprises a 5′ untranslated region, an NS3 protein coding region, an NS4A protein coding region, an NS4B protein coding region, an NS5A protein coding region, an NS5B protein coding region, and a 3′ untranslated region of a hepatitis C virus genome, wherein the nucleic acid has nucleotide substitutions causing one or more amino acid substitutions selected from the group consisting of M(1205)K, F(1548)L, C(1615)W, T(1652)N, A(2196)T, A(2218)S, H(2223)Q, Q(2281)R, K(2520)N, and G(2374)S, as defined using the amino acid sequence shown in SEQ ID NO: 6 in the Sequence Listing as a reference sequence, in the NS3 protein coding region, the NS5A protein coding region, or the NS5B protein coding region.

### TECHNICAL FIELD

[0001] The present invention relates to hepatitis C virus-derived nucleic acids and expression vectors, transformed cells, and hepatitis C virus (HCV) particles prepared using the nucleic acids.

### BACKGROUND ART

[0002] An experimental system that enables efficient virus amplification is essential for viral research and research and development of antiviral drugs. Moreover, if a system for amplifying a virus using cultured cells or a system for evaluating viral growth using cultured cells exists, viral research and research and development regarding antiviral drugs will be drastically advanced.

[0003] The hepatitis C virus (hereinafter, HCV) belongs to the family Flaviviridae, comprising single-stranded (+) sense RNA as its genome, and is known to cause hepatitis C. Recent studies have revealed that the hepatitis C virus is classified into many types depending on genotype or serotype. According to Simmonds et al'phylogenetic analysis method using the nucleotide sequences of the HCV strains, HCV is classified into 6 genotypes, and the genotypes are further classified into several subtypes (Simmonds, P. et al, Hepatology, 1994, 10: 1321-1324). The nucleotide sequences of the full-length genomes of a plurality of HCV genotypes have now been determined (Choo et al., Science, 1989, 244: 359-362; Kato et al., J. Med. Virol., 2001, 64: 334-339; Okamoto, H et al., J. Gen Virol., 1992, 73: 673-679; and Yoshioka et al., Hepatology, 1992, 16: 293-299).

[0004] Until recently, infection of cultured cells with HCV or replication of the HCV genome in cultured cells had been impossible. Hence, research into the HCV replication mechanism or the HCV infection mechanism has required experiments using an in vivo system using chimpanzees as experimental animals. However, preparation of subgenomic replicon RNA from the Con1 strain, the N strain, and the O strain of HCV of genotype 1b, as well as the H77 strain of HCV of genotype 1a has made it possible to conduct experiments on research into the HCV replication mechanism in an in vitro system using cultured cells (JP Patent Publication (Kokai) No. 2001-17187 A; Lomann et al., Science, 1999, 285: 110-113; Blight et al., Science, 2000, 290: 1972-1974; Friebe et al., 2001, 75: 12047-12057; and Ikeda et al., J. Virol., 2002, 76: 2997-3006). Here, the term “HCV subgenomic replicon RNA” refers to RNA comprising a part of the HCV genome, which is incapable of producing infectious HCV particles but capable of self-replication of HCV genome-derived RNA introduced into cells.

[0005] Furthermore, together with subgenomic replicon RNA, full-genomic replicon RNA, by which infectious HCV particles are produced by in vitro introduction into Huh7 cells, has been prepared from the JFH-1 strain of HCV of genotype 2a. This has made it possible to conduct an experiment with an in vitro system using cultured cells also for research into the HCV infection mechanism (Kato, T et al., Gastroenterology, 2003, 125: 1808-1817; and Wakita, T et al., Nat. Med., 2005, 11: 791-796). Here, the term “HCV full-genomic replicon RNA” refers to RNA comprising a full-length HCV genome, which is capable of self-replication of HCV genome-derived RNA introduced into cells and is capable of producing infectious HCV particles.

[0006] Meanwhile, hepatitis C is currently treated mainly by single-agent therapy with interferon-α or interferon-β and combination therapy with interferon-α and ribavirin, which is a purine-nucleoside derivative. However, it is known that even when these therapies are carried out, therapeutic effects are observed for only about 60% of all treated patients. It is also known that the disease flares up again among half or more of effectively treated patients if the therapies are discontinued. Also, the therapeutic effects of interferons are associated with HCV genotypes and thus are known to be low for genotype 1b but high for genotype 2a (Mori, S., et al., Biochem. Biophis. Res. Commun., 1992, 183: 334-342).

[0007] The reasons why the therapeutic effects of interferons differ depending on HCV genotype have not yet been clarified. One of the reasons is thought to be the presence of differences in HCV replication mechanism or HCV replication efficiency.

[0008] However, the presence of the HCV subgenomic replicon RNA is limited to several types from the HCV strains of genotypes 1a, 1b, and 2a. Moreover, the presence of full-genomic replicon RNA is limited to one type from the JFH-1 strain of HCV of genotype 2a. Hence, elucidation of the relationship between HCV genotype and HCV replication mechanism or HCV replication efficiency has been difficult. Also, the types of viral particles that can be artificially prepared and used for raw materials of HCV vaccines are also limited to those generated from the full-genomic replicon RNA. Thus, the finding of other subgenomic replicon RNAs or full-genomic replicons RNA of HCV with a characteristic replication mechanism or replication efficiency has been desired.

[0009] Subgenomic replicon RNAs or full-genomic replicon RNAs from HCV of the same genotype or from the same HCV strain having different characteristics in terms of replication mechanism or replication efficiency have been absent. Hence, differences in HCV replication mechanism or HCV replication efficiency could not have been compared using samples with the same genetic background. Furthermore, factors required for replication of HCV targeted by a new anti-HCV therapeutic agent could not have been identified and an anti-HCV therapeutic agent capable of exerting beneficial effects independently from the replication mechanism or the replication efficiency could not have been screened for.

### DISCLOSURE OF THE INVENTION

### Problem to be Solved by the Invention

[0010] An object of the present invention is to provide new HCV subgenomic replicon RNA and full-genomic replicon RNA with high self-replication capacity.

### Means for Solving the Problem

[0011] The present inventors have introduced subgenomic replicon RNA prepared from an HCV genome isolated from a fulminant hepatitis C patient into cultured cells and then intensively studied mutations generated in the subgenomic replicon RNA that has self-replicated. Thus, they have revealed a mutation that significantly increases self-replication capacity (autonomous replication capacity). Furthermore, they have succeeded in preparation of full-genomic replicon RNA capable of producing infectious HCV particles by ligating regions and the like encoding structural protein of the HCV genome to HCV subgenomic replicon RNA having the mutation that significantly increases self-replication capacity. Thus, they have completed the present invention.

[0012] Specifically, the present invention provides a nucleic acid, comprising a 5′ untranslated region, an NS3 protein coding region, an NS4A protein coding region, an NS4B protein coding region, an NS5A protein coding region, an NS5B protein coding region, and a 3′ untranslated region of a hepatitis C virus genome, wherein the nucleic acid has nucleotide substitutions causing one or more amino acid substitutions selected from the group consisting of M(1205)K, F(1548)L, C(1615)W, T(1652)N, A(2196)T, A(2218)S, H(2223)Q, Q(2281)R, K(2520)N, and G(2374)S, as defined using the amino acid sequence shown in SEQ ID NO: 6 in the Sequence Listing as a reference sequence, in the NS3 protein coding region, the NS5A protein coding region, or the NS5B protein coding region.

[0013] The nucleic acid preferably has, at least, a nucleotide substitution causing amino acid substitution A(2218)S in the NS5A protein coding region.

[0014] The nucleic acid preferably further comprising a Core protein coding region, an E1 protein coding region, an E2 protein coding region, a p7 protein coding region, and an NS2 protein coding region of a hepatitis C virus genome.

[0015] In a preferred embodiment, the nucleic acid encodes an amino acid sequence having one or more amino acid substitutions selected from the group consisting of M(1205)K, F(1548)L, C(1615)W, T(1652)N, A(2196)T, A(2218)S, H(2223)Q, Q(2281)R, K(2520)N, and G(2374)S, as defined using the amino acid sequence shown in SEQ ID NO: 6 in the Sequence Listing as a reference sequence, in the amino acid sequence shown in SEQ ID NO: 5 or 6 in the Sequence Listing.

[0016] In another preferred embodiment, the nucleic acid consists of the nucleotide sequence shown in SEQ ID NO: 12 or 13 in the Sequence Listing.

[0017] The nucleic acid may further comprise a marker gene and/or an IRES sequence.

[0018] The nucleic acid may be a subgenomic replicon RNA.

[0019] Alternatively, the nucleic acid may be a full-genomic replicon RNA.

[0020] The nucleic acid comprising an HCV subgenomic sequence is useful as a template for synthesis of HCV subgenomic replicon RNA or directly as HCV subgenomic replicon RNA. HCV subgenomic replicon RNA is introduced into cultured cells, so that self-replication capacity higher than that of HCV subgenomic replicon RNA obtained thus far is exhibited. Accordingly, the nucleic acid comprising an HCV subgenomic sequence can be used for screening for an anti-HCV drug that inhibits HCV replication or for studies for elucidating HCV replication mechanism.

[0021] The nucleic acid comprising an HCV full-genomic sequence is useful as a template for synthesis of HCV full-genomic replicon RNA or directly as HCV full-genomic replicon RNA. HCV full-genomic replicon RNA is introduced into cultured cells, so that self-replication capacity higher than that of HCV full-genomic replicon RNA obtained so far is exhibited and infectious HCV particles can be efficiently produced.

[0022] The present invention further provides an expression vector comprising the nucleic acid that is operably ligated downstream of a promoter.

[0023] The present invention may further provide an expression vector comprising a nucleic acid that is operably ligated downstream of a promoter and encodes the full-genomic replicon RNA.

[0024] The present invention also provides a transformed cell that is obtained by introducing the full-genomic replicon RNA or an expression vector comprising a nucleic acid encoding the full-genomic replicon RNA. In such transformed cells, preferably, the full-genomic replicon RNA is self-replicating. Such transformed cells can be appropriately used for the production of hepatitis C virus (HCV) particles. Hepatitis C virus (HCV) particles obtained by culturing the transformed cells are further provided according to the present invention. The present invention also provides antibodies against such hepatitis C virus (HCV) particles.

[0025] This description includes the disclosure of the description and drawings of Japanese Patent Application No. 2008-335016, from which the present application claims priority.

### Effects of the Invention

[0026] According to the present invention, HCV subgenomic replicon RNA and HCV full-genomic replicon RNA having high self-replication capacity can be provided. Such replicon RNA can be used for screening for an anti-HCV drug inhibiting HCV replication or for studies for elucidating HCV replication mechanism. Moreover, the HCV full-genomic replicon RNA of the present invention has HCV particle-producing capacity higher than that of HCV full-genomic replicon RNA obtained so far. Hence, infectious HCV particles can be prepared in vitro in large amounts. The thus obtained HCV particles can be used as HCV vaccines or antigens for preparation of anti-HCV antibodies.

### BRIEF DESCRIPTION OF THE DRAWINGS

[0027] FIG. 1A shows the full-length genome structure of the HCV JFH-2.1 strain and JFH-2.3 strain. FIGS. 1B and C show the structures of vectors pSGR-JFH-2.1 and pSGR-JFH-2.3 for synthesis of HCV subgenomic replicon RNA from the JFH-2.1 and JFH-2.3 strains. FIG. 1D shows the structure of an HCV subgenomic replicon RNA from the JFH-2.1 and JFH-2.3 strains.

[0028] FIG. 2 shows photos showing colony formation by cells into which HCV subgenomic replicon RNA from the JFH-2.1 and the JFH-2.3 strains were introduced.

[0029] FIG. 3 shows amino acid mutations found in mutant replicons, which took place in cells into which the JFH-2.3 subgenomic replicon RNA had been introduced.

[0030] FIG. 4 shows the mutant JFH-2.1 HCV subgenomic replicon RNA (FIG. 4A) into which the amino acid substitutions found in the JFH-2.3 subgenomic replicon were introduced and photos showing colony formation by cells transformed with each of them (FIG. 4B).

[0031] FIG. 5 shows the structures of J6/JFH-2.1 and J6/JFH-2.1 A2217S chimeric HCV full-genomic replicon RNAs.

[0032] FIG. 6 shows changes over time in Core protein level in Huh7 cells into which the J6/JFH-2.1 and J6/JFH-2.1 A2217S chimeric HCV full-genomic replicon RNAs were introduced.

[0033] FIG. 7 shows changes over time in Core protein level in culture supernatants resulting from subculture of Huh7 cells into which the J6/JFH-2.1 A2217S chimeric HCV full-genomic replicon RNA was introduced.

[0034] FIG. 8 shows the result of evaluating the infectivity of J6/JFH-2.1 A2217S HCV particles.

[0035] FIG. 9 shows the structures of the JFII-2.1 genome RNA (HCV full-genomic replicon RNA) and the JFH-2.1 A2218S HCV full-genomic replicon RNA.

[0036] FIG. 10 shows changes over time in Core protein level in culture supernatants resulting from subculture of Huh7 cells into which the JFH-2.1 A2218S HCV full-genomic replicon RNA was introduced.

[0037] FIG. 11 shows the result of evaluating the infectivity of JFH-2.1 A2218S HCV particles.

[0038] FIG. 12 shows changes over time in Core protein level in culture supernatants resulting from subculture of Huh7 cells (Huh7.5.1 cells) transfected with J6/JFH-2.1 A2217S-derived mutant HCV RNA. In FIG. 12, J6/JFH2-AS, CS, LP, TI, CS/LP, CS/TI, TI/LP, CS/TI/LP, AT/CS/TI/LP, all-4A-mutations-introduced virus, and all-4B-mutations-introduced virus denote J6/JFH-2.1 A2217S, J6/JFH-2.1 A2217S(CS), J6/JFH-2.1 A2217S (LP), J6/JFH-2.1 A2217S (TI), J6/JFH-2.1 A2217S(CS/LP), J6/JFH-2.1 A2217S(CS/TI), J6/JFH-2.1 A2217S (TI/LP), J6/JFH-2.1 A2217S(CS/TI/LP), J6/JFH-2.1 A2217S (AT/CS/TI/LP), J6/JFH-2.1 A2217S (TI/MT/MK/NT/IV/SG/TA), and J6/JFH-2.1 A2217S (AT/CS/TI/LP/MV/VG/IV/KR), respectively. The results for J6/JFH-2.1 A2217S (TI/MT/MK/NT/IV/SG/TA) are shown with open circles and the results for J6/JFH-2.1 A2217S (AT/CS/TI/LP/MV/VG/IV/KR) are shown with solid circles.

### EMBODIMENTS FOR CARRYING OUT THE INVENTION

### (1) Mutant HCV Replicon RNA and Nucleic Acid Encoding the RNA According to the Present Invention

[0039] The hepatitis C virus (HCV) genome is a single-stranded (+) RNA comprising approximately 9,600 nucleotides. This genomic RNA comprises a 5′-untranslated region (also referred to as “5′ UTR” or “5′ NTR”), a translational region composed of a structural region and a nonstructural region, and a 3′-untranslated region (also referred to as “3′ UTR” or “3′ NTR”). In the structural region, HCV structural proteins are encoded and in the nonstructural region, nonstructural proteins are encoded.

[0040] HCV structural proteins and nonstructural proteins are first transcribed and translated as a continuous precursor protein (polyprotein) from the translational region. HCV structural proteins are subjected to limited degradation by protease in host cells and nonstructural protein portions are subjected to limited degradation by 2 types of autocatalytically acting HCV protease activity, and then these proteins are separately released as mature proteins.

[0041] HCV structural proteins are Core, E1, E2, and p7, composing an HCV viral particle part. Core is a Core protein, E1 and E2 are envelope proteins, and p7 is a protein that forms an ion channel functioning on the membranes of host cells.

[0042] HCV nonstructural proteins are NS2, NS3, NS4A, NS4B, NS5A, and NS5B, which are enzyme proteins having activity involved in viral genome replication or HCV protein processing. Various HCV genotypes are known and HCV genomes of various genotypes are known to have similar gene structures.

[0043] The HCV 5′ untranslated region (5′ UTR or 5′ NTR) provides an internal ribosome-entry site (IRES) for protein translation and elements required for replication, comprising about 340 nucleotides from the N-terminus of the full-length HCV genome.

[0044] HCV 3′ untranslated region (3′ UTR or 3′ NTR) has functions of helping HCV replication and comprises an additional region of about 100 nucleotides, in addition to a poly U region.

[0045] With the use of the HCV genome, the present invention provides RNA that is self-replicable with high efficiency or DNA that encodes the RNA, comprising an HCV subgenomic sequence or the HCV full-genomic sequence into which a mutation has been introduced to increase self-replication capacity.

[0046] The term “replicon RNA” in the present invention refers to RNA that is self-replicable (autonomously replicable) in cells. Replicon RNA introduced into cells self-replicates and the resulting RNA copies are distributed to daughter cells after cell division, so that stable introduction into cells is possible using replicon RNA. In the present invention, the term “genotype” in the context of HCV refers to a genotype that is classified according to the International Classification developed by Simmonds et al.

[0047] In a preferred embodiment, the present invention provides a nucleic acid comprising a 5′ untranslated region, an NS3 protein coding region, an NS4A protein coding region, an NS4B protein coding region, an NS5A protein coding region, an NS5B protein coding region, and a 3′ untranslated region of a hepatitis C virus genome, wherein the nucleic acid has nucleotide substitutions that cause one or more amino acid substitutions selected from the group consisting of M(1205)K, F(1548)L, C(1615)W, T(1652)N, A(2196)T, A(2218)S, H(2223)Q, Q(2281)R, K(2520)N, and G(2374)S, as defined using the amino acid sequence shown in SEQ ID NO: 6 in the Sequence Listing as a reference sequence, in the NS3 protein coding region, the NS5A protein coding region, or the NS5B protein coding region. Such a nucleic acid is typically mutant HCV replicon RNA or DNA encoding the mutant RNA.

[0048] The nucleic acid according to the present invention is a nucleic acid that comprises a 5′ untranslated region, an NS3 protein coding region, an NS4A protein coding region, an NS4B protein coding region, an NS5A protein coding region, an NS5B protein coding region, and a 3′ untranslated region of a hepatitis C virus genome and encodes an amino acid sequence comprising at least the NS3 protein, the NS5A protein, or the NS5B protein in which one or more amino acid substitutions selected from the group consisting of M(1205)K, F(1548)L, C(1615)W, T(1652)N, A(2196)T, A(2218)S, H(2223)Q, Q(2281)R, K(2520)N, and G(2374)S, as defined using the amino acid sequence shown in SEQ ID NO: 6 in the Sequence Listing as a reference sequence.

[0049] The term “nucleic acid” as used herein refers to, in addition to RNA and DNA, a hybrid nucleic acid formed via binding thereof. Also, herein, the term “protein coding region” refers to a nucleotide sequence encoding the amino acid sequence of a given protein, which may or may not comprise an initiation codon and a termination codon.

[0050] In the Description, the expression “amino acid substitution “a(Z)_{b}” as defined using the amino acid sequence shown in SEQ ID NO: “X” in the Sequence Listing as a reference sequence” means that an amino acid in a given amino acid sequence Y to be aligned with amino acid “a” located at position “Z” in the amino acid sequence shown in SEQ ID NO: “X”, which is, but not limited to, preferably amino acid “a” that is the same as in SEQ ID NO: “X” or an amino acid analogous to amino acid “a”, is substituted with amino acid “b”, when the amino acid sequence Y (preferably, homologous to SEQ ID NO: “X”) is aligned with the sequence shown in SEQ ID NO: “X” in the Sequence Listing as a reference sequence. Here, “a” and “b” represent given amino acids, which are each described based on single letter notation generally used for amino acids in the field of biology.

[0051] Thus, for example, the expression “amino acid substitution A(2218)S as defined using the amino acid sequence shown in SEQ ID NO: 6 in the Sequence Listing as a reference sequence,” means a substitution of S (serine) for an amino acid in a given amino acid sequence Y to be aligned with the amino acid A (alanine) at position 2218 of SEQ ID NO: 6 when the amino acid sequence “Y” of a HCV precursor protein is aligned with the amino acid sequence shown in SEQ ID NO: 6 (the amino acid sequence of the precursor protein of the HCV JFH-2.3 strain). Therefore, when the 2217^{th} alanine (alanine at position 2217) in the amino acid sequence of an entire HCV precursor protein is aligned with the alanine at position 2218 in the amino acid sequence shown in SEQ ID NO: 6, for example, substitution of alanine at position 2217 with serine in the amino acid sequence of interest corresponds to “amino acid substitution A(2218)S as defined using the amino acid sequence shown in SEQ ID NO: 6 in the Sequence Listing as a reference sequence.”

[0052] Also, the phrase “amino acid at position “Z” as defined using the amino acid sequence shown in SEQ ID NO: “X” in the Sequence Listing as a reference sequence” refers to an amino acid in a given amino acid sequence Y to be aligned with the amino acid at position “Z” in the amino acid sequence shown in SEQ ID NO: “X” when the sequence shown in SEQ ID NO: “X” is aligned with the sequence Y (preferably, homologous to SEQ ID NO: “X”). The expression “nucleotide at position “Z” as defined using the nucleotide sequence shown in SEQ ID NO: “X” in the Sequence Listing as a reference sequence” will be also similarly understood.

[0053] In the Description, if a nucleic acid is RNA and the nucleotide sequence or nucleotides of RNA are specified by referring to SEQ ID NO(S) in the Sequence Listing, “T (thymine)” in the nucleotide sequence shown in the relevant SEQ ID NO should be read as “U (uracil).”

[0054] Alignment of a given sequence Y with the sequence shown in SEQ ID NO: “X” can be manually carried out, or by the Clustal W multiple alignment program (Thompson, J. D. et al, (1994) Nucleic Acids Res. 22, p. 4673-4680) using default setting, for example.

[0055] In the Description, each HCV region can also be identified with the nucleotide positions at the 5′ terminus and the 3′ terminus of each region, as defined using the nucleotide sequence shown in SEQ ID NO: 4 (the full-length genome sequence of the JFH-2.3 strain) as a reference sequence. In the nucleotide sequence shown in SEQ ID NO: 4, 5′ UTR ranges from nucleotide positions 1 to 340, the Core coding region (Core region) ranges from nucleotide positions 341 to 913, the E1 coding region (E1 region) ranges from nucleotide positions 914 to 1492, the E2 coding region (E2 region) ranges from nucleotide positions 1493 to 2593, the p7 coding region (p7 region) ranges from nucleotide positions 2594 to 2782, the NS2 coding region (NS2 region) ranges from nucleotide positions 2783 to 3433, the NS3 coding region (NS3 region) ranges from nucleotide positions 3434 to 5326, the NS4A coding region (NS4A region) ranges from nucleotide positions 5327 to 5488, the NS4B coding region (NS4B region) ranges from nucleotide positions 5489 to 6271, the NS5A coding region (NS5A region) ranges from nucleotide positions 6272 to 7669, the NS5B coding region (NS5B region) ranges from nucleotide positions 7670 to 9445, and 3′ UTR ranges from nucleotide positions 9446 to 9686.

[0056] In the Description, an amino acid in an HCV precursor protein can be specified with an amino acid number that is given by numbering with the translation initiation methionine (M) of the precursor protein being numbered as the “1st” amino acid. For example, the precursor protein of the JFH-2.1 strain begins from the translation initiation methionine and then terminates at the 3034^{th} arginine (R). In addition, the 2218^{th} amino acid of the JFH-2.1 strain is alanine (A) comprised in the NS5A region.

[0057] In the Description, an amino acid substitution is denoted by, A(2218)S, or A→S at position 2218, for example. Specifically, as a rule, both of them mean that A (alanine) at position 2218 is substituted with S (serine). In the Description, amino acids or amino acid residues are described by single letter codes or three letter codes that are generally employed for amino acids in the field of biology (Sambrook et al., Molecular Cloning: A Laboratory Manual Second Edition, 1989). The amino acids as denoted above also include amino acids subjected to post-translational modification such as hydroxylation, glycosylation, or sulfation.

[0058] In the present invention, one or more amino acid substitutions selected from the group consisting of M(1205)K, F(1548)L, C(1615)W, T(1652)N, A(2196)T, A(2218)S, H(2223)Q, Q(2281)R, K(2520)N, and G(2374)S as defined using the amino acid sequence shown in SEQ ID NO: 6 in the Sequence Listing as a reference sequence are introduced into the NS3 protein, the NS5A protein, and the NS5B protein in an HCV precursor protein, so that the self-replication capacity of the replicon RNA encoding the HCV precursor protein can be increased. Such introduction of an amino acid substitution(s) can be carried out by introducing a nucleotide substitution that causes the relevant amino acid substitution into DNA encoding HCV replicon RNA using genetic engineering techniques known by persons skilled in the art.

[0059] A nucleotide substitution(s) that causes the above amino acid substitution(s) can be easily specified by comparing a codon of the amino acid after substitution with a codon of the amino acid before substitution, in light of the genetic code table well-known in the field of biology.

[0060] The nucleic acid according to the present invention such as mutant HCV replicon RNA or DNA encoding the RNA is not limited, but preferably has a nucleotide substitution that causes at least amino acid substitution A(2218)S from among the above amino acid substitutions. This is because the amino acid substitution is particularly effective for enhancing self-replication. For example, a nucleotide substitution that causes amino acid substitution A(2218)S is preferably a nucleotide substitution that converts codons encoding alanine at amino acid position 2218 (in general, GCT, GCC, GCA, or GCG) into codons encoding serine, such as TCA, TCC, TCG, TCT, AGT, or AGC.

[0061] The nucleic acid according to the present invention, such as mutant HCV replicon RNA or DNA encoding the RNA, may further comprise a Core protein coding region, an E1 protein coding region, an E2 protein coding region, and a p7 protein coding region of a hepatitis C virus genome, in addition to the 5′ untranslated region, the NS3 protein coding region, the NS4A protein coding region, the NS4B protein coding region, the NS5A protein coding region, the NS5B protein coding region, and the 3′ untranslated region. The mutant HCV replicon RNA according to the present invention or a nucleic acid encoding the RNA may further comprise an NS2 protein coding region of a hepatitis C virus genome. The mutant HCV replicon RNA according to the present invention or a nucleic acid encoding the RNA further preferably comprises the Core protein coding region, the E1 protein coding region, the E2 protein coding region, the p7 protein coding region, and the NS2 protein coding region, and more preferably comprises the same in this order.

[0062] A preferable example of the nucleic acid according to the present invention is a nucleic acid encoding an amino acid sequence with one or more amino acid substitutions selected from the group consisting of M(1205)K, F(1548)L, C(1615)W, T(1652)N, A(2196)T, A(2218)S, H(2223)Q, Q(2281)R, K(2520)N, and G(2374)S, as defined using the amino acid sequence shown in SEQ ID NO: 6 in the Sequence Listing as a reference sequence, in the amino acid sequence shown in SEQ ID NO: 5 or 6 in the Sequence Listing. The nucleic acid encodes a mutant of the precursor protein of the JFH-2.1 strain (SEQ ID NO: 5) or the JFH-2.3 strain (SEQ ID NO: 6) isolated from a fulminant hepatitis patient.

[0063] Another preferable example of the above nucleic acid according to the present invention is a nucleic acid comprising the nucleotide sequence shown in SEQ ID NO: 12 or 13 in the Sequence Listing.

[0064] The nucleic acid according to the present invention such as mutant HCV replicon RNA or DNA encoding the RNA preferably further comprises a foreign gene such as a marker gene and/or an IRES sequence. Examples of such a marker gene includes a selection marker gene that can impart selectivity to cells by which only cells expressing the relevant gene are selected and a reporter gene encoding a gene product serving as an index of the gene expression. In the present invention, preferable examples of such a selection marker gene include, but are not limited to, a neomycin resistance gene, a thymidine kinase gene, a kanamycin resistance gene, a pyrithiamine resistance gene, an adenylyl transferase gene, a Zeocin resistance gene, and a puromycin resistance gene. In the present invention, preferable examples of a reporter gene include, but are not limited to, a transposon Tn9-derived chloramphenicol acetyltransferase gene, an Escherichia coli-derived β glucuronidase or β galactosidase gene, a luciferase gene, a green fluorescent protein gene, a jellyfish-derived aequorin gene, and a secreted placental alkaline phosphatase (SEAP) gene.

[0065] The term “IRES sequence” in the present invention refers to an internal ribosome-entry site capable of causing a ribosome to bind internally to RNA so as to initiate translation. Preferable examples of such an IRES sequence in the present invention include, but are not limited to, EMCV IRES (internal ribosome-entry site of encephalomyocarditis virus), FMDV IRES, and HCV IRES.

[0066] The nucleic acid according to the present invention, such as mutant HCV replicon RNA or DNA encoding the RNA may be a nucleic acid comprising an HCV subgenomic replicon sequence which comprises, as an HCV-derived sequence, only a 5′ untranslated region, an NS3 protein coding region, an NS4A protein coding region, an NS4B protein coding region, an NS5A protein coding region, an NS5B protein coding region, and a 3′ untranslated region of the hepatitis C virus genome. In the present invention, the term “HCV subgenome” refers to a partial sequence of the HCV full-length genome. HCV subgenomic replicon RNA is replicon RNA that comprises an HCV subgenome, but comprises not all regions ranging from 5′ UTR to 3′ UTR of the HCV full-length genome.

[0067] An example of a nucleic acid comprising an HCV subgenomic replicon sequence is RNA wherein, in the 5′ to 3′ direction, 5′ UTR, a sequence comprising 36 nucleotides from the 5′ terminus of a Core coding region, a luciferase gene (marker gene), an encephalomyocarditis virus IRES sequence, an NS3 region, an NS4A region, an NS4B region, an NS5A region, an NS5B region, and 3′ UTR are ligated in this order, for example.

[0068] The nucleic acid according to the present invention such as mutant HCV replicon RNA or DNA encoding the RNA may also be HCV full-genomic replicon RNA. The term “HCV full-genomic replicon RNA” refers to replicon RNA comprising all regions ranging from 5′ UTR to 3′ UTR of the HCV full-length genome, specifically, 5′ UTR, a Core protein coding region (Core region), an E1 protein coding region (E1 region), an E2 protein coding region (E2 region), a p7 protein coding region (p7 region), an NS2 protein coding region (NS2 region), an NS3 protein coding region (NS3 region), an NS4A protein coding region (NS4A region), an NS4B protein coding region (NS4B region), an NS5A protein coding region (NS5A region), an NS5B protein coding region (NS5B region), and 3′ UTR. HCV full-genomic replicon RNA may consist of the HCV full-length genome sequence or may further comprise an additional sequence. In the present invention, the term “HCV full-length genome” or “full-length HCV genome” refers to RNA comprising the full-length sequence (ranging from 5′ UTR to 3′ UTR) of the HCV genome or DNA encoding the RNA.

### (2) Preparation of Replicon RNA According to the Present Invention

[0069] The mutant HCV replicon RNA according to the present invention, specifically, the mutant HCV subgenomic replicon RNA or the mutant HCV full-genomic replicon RNA can be prepared by preparing a replicon RNA expression vector by any genetic engineering technique known by persons skilled in the art using DNA encoding the mutant HCV replicon RNA and then using it as a template. The present invention also provides a vector and particularly an expression vector comprising a nucleic acid (preferably, DNA encoding mutant HCV replicon RNA) such as mutant HCV replicon RNA, DNA encoding the RNA, or the like, which is operably ligated downstream of a promoter. The expression vector can be used to efficiently synthesize in vitro the mutant HCV replicon RNA. Basic techniques for construction of the replicon RNA expression vector according to the present invention are as described in the document of Lohmann et al. (Science, 285: 110-113, 1999) and the document of Kato et al. (Gastroenterology, 125: 1808-1817, 2003).

[0070] As an HCV strain that can be used for preparation of the nucleic acid according to the present invention, any strain isolated from an HCV patient or a derivative strain thereof can be used. An HCV strain isolated from a fulminant hepatitis C patient is more preferably used. A method for isolation of the HCV genome from a patient is as described in the document of Kato et al (Gastroenterology, 125: 1808-1817, 2003). In the present invention, the term “derivative strain” in the context of HCV refers to a strain derived from a viral strain of interest.

[0071] The genome of any hepatitis C virus strain can be used for preparation of the nucleic acid according to the present invention. At least one genome of hepatitis C virus of genotype 2a is preferably used. Regions encoding the NS3 protein, the NS4A protein, the NS4B protein, the NS5A protein, and the NS5B protein may be derived from any hepatitis C virus genome. More preferably, such regions from the genome of hepatitis C virus of genotype 2a are used. Further preferably, a sequence from the genome of the HCV JFH-2.1 or HCV JFH-2.3 strain, a derivative strain of the strains, or the HCV JFH-1 strain, into which the above amino acid substitution(s) is introduced, is used.

[0072] The nucleic acid according to the present invention may be a chimera from the genome of one, two, or more types of arbitrary hepatitis C virus. The nucleic acid according to the present invention may be, but is not limited to, a chimera in which at least one genome of hepatitis C virus of genotype 2a is used. For preparation of the nucleic acid according to the present invention, the genome of the HCV JFH-1 strain, J6CF strain, HCV JFH-2.1 strain, HCV JFH-2.3 strain, or a derivative strain of these strains can be used, for example.

[0073] The mutant HCV replicon RNA according to the present invention can be prepared by the following method, for example, but the method is not limited thereto. First, DNA encoding the above mutant HCV replicon RNA is ligated by a conventional method downstream of an RNA promoter in a vector, so that a DNA clone is prepared. Examples of an RNA promoter include, but are not limited to, a T7 promoter, an SP6 promoter, and a T3 promoter. A T7 promoter is particularly preferable. As a vector, pUC19 (TaKaRa), pBR322(TaKaRa), pGEM-3Z (Promega), pSP72 (Promega), pCRII (Invitrogen), pT7Blue (Novagen), or the like can be used, but the examples are not limited to them.

[0074] Preparation (synthesis) of mutant HCV replicon RNA from an expression vector comprising DNA encoding the mutant HCV replicon RNA can be carried out using a MEGA script T7 kit (Ambion) or the like, for example. Furthermore, when a vector is introduced into cells for expression, a vector comprising RNA polymerase I promoter and terminator (described in WO2007-037428 (HCV#9)) is preferably used.

[0075] The thus prepared mutant HCV replicon RNA may be extracted and purified by an RNA extraction method, purification method, or the like known by persons skilled in the art.

### (3) Preparation of Transformed Cells Comprising Self-Replicating Mutant HCV Replicon RNA

[0076] The above-prepared replicon RNA such as mutant HCV replicon RNA is introduced into host cells, so that transformed cells comprising self-replicating replicon RNA can be obtained. The present invention also provides transformed cells obtained via introduction of mutant HCV replicon RNA into the cells, in which the replicon RNA self-replicates.

[0077] Cells into which replicon RNA is introduced may be any cells that enable HCV replicon replication. Such cells are more preferably human liver-derived cells, human uterine cervix-derived cells or human embryonic kidney-derived cells. Examples of such cells include Huh7 cells, HepG2 cells, IMY-N9 cells, HeLa cells, and 293 cells. Further appropriate examples of such cells include derivative strains of Huh7 cells such as Huh7.5 cells and Huh7.5.1 cells. Also, cells such as Huh7 cells, HepG2 cells, IMY-N9 cells, HeLa cells or 293 cells, in which a CD81 gene and/or a Claudin 1 gene is expressed, are also examples of such cells. Of these cells, Huh7 cells or derivative cells of Huh7 cells are preferably used.

[0078] Replicon RNA can be introduced into cells using any technique known by persons skilled in the art. Examples of such a technique include calcium phosphate coprecipitation, a DEAE dextran method, lipofection, microinjection, and electroporation. Preferably, lipofection and electroporation are carried out. More preferably, a method based on electroporation is particularly preferably carried out.

[0079] Regarding replicon RNA, target replicon RNA alone may be introduced or target replicon RNA mixed with another nucleic acid may also be introduced. To vary the amount of replicon RNA while keeping the amount of RNA to be introduced at a constant level, target replicon RNA is mixed with total cellular RNA extracted from cells to be used for introduction and then the mixture is introduced into the cells. The amount of replicon RNA to be introduced into cells may be determined depending on an introduction method to be employed. The amount of replicon RNA to be used herein ranges from preferably 1 picogram to 100 micrograms and more preferably 10 picograms to 10 micrograms.

[0080] When replicon RNA comprising a marker gene is used, cells in which replicon RNA has been introduced and is self-replicating can be selected using the expression of the marker gene.

[0081] Viable cells can be cloned by a conventional method from colonies formed after introduction into cells and culturing the cells. In such a manner, cell clones comprising self-replicating replicon RNA can be established.

[0082] The thus established cell clones are preferably actually confirmed for self-replication of replicon RNA by detecting the replication of replicon RNA from the introduced replicon RNA in the cells, confirming the expression of a marker gene in replicon RNA, or confirming the expression of an HCV protein (e.g., Core), for example. Expression of an HCV protein can be confirmed by reacting an antibody against an HCV protein to be expressed from the introduced replicon RNA with a protein extracted from cell clones. This method can be carried out by any protein detection method known by persons skilled in the art. Specifically, for example, the method can be carried out by blotting a protein sample extracted from cell clones to nitrocellulose membrane, reacting an anti-HCV protein antibody (e.g., an anti-Core-specific antibody or antiserum collected from a hepatitis C patient) with the membrane, and then detecting the anti-HCV protein antibody. If an HCV protein is detected from proteins extracted from cell clones, it can be concluded that HCV-derived replicon RNA self-replicates and the HCV protein is expressed in the cell clones. The thus established and preferably confirmed cell clones are transformed cells obtained by introduction of the replicon RNA according to the present invention.

[0083] As a method for evaluation of the replication capacity of replicon RNA in transformed cells, the functions of a foreign gene ligated into HCV subgenomic replicon RNA or HCV full-genomic replicon RNA can be measured. When a foreign gene is a drug resistance gene, evaluation can be made by determining the number of cells or the number of colonies of cells that grow in drug-containing selective medium. Also, when a foreign gene is an enzyme gene, replication capacity can be evaluated by measuring the enzyme activity. As another method, replication capacity can be evaluated by quantitatively determining the amount of RNA replicated by quantitative PCR.

[0084] It has been demonstrated that efficient replication of an HCV genome requires the occurrence of mutation in the nucleotide sequence of the HCV genome (Lohmann, V. et al., J. Virol., 75: 1437-1449, 2001). Mutation that improves replication is referred to as adaptive mutation. The mutant HCV replicon RNA according to the present invention is replicon RNA with significantly enhanced self-replication. Through continuation of culture, adaptive mutation takes place in HCV replicon RNA and replication may be significantly improved. Amino acid substitution A(2218)S, as defined using the amino acid sequence shown in SEQ ID NO: 6 in the Sequence Listing as a reference sequence leads to such significant enhancement in replication capacity.

### (4) Production of Infectious HCV Particles

[0085] In the present invention, transformed cells obtained by introduction of the HCV replicon RNA according to the present invention are subcultured, so that infectious HCV particles can be produced and preferably released into medium. Herein, the HCV replicon RNA according to the present invention is a replicon RNA that comprises an HCV structural region in addition to a 5′ untranslated region, sequences encoding an NS3 protein, an NS4A protein, an NS4B protein, an NS5A protein, and an NS5B protein, respectively, and a 3′ untranslated region of a hepatitis C virus genome. Specifically, the HCV replicon RNA is:

[0086] a nucleic acid that further comprises a Core protein coding region, an E1 protein coding region, an E2 protein coding region, and a p7 protein coding region of the hepatitis C virus genome in addition to a 5′ untranslated region, sequences encoding an NS3 protein, an NS4A protein, an NS4B protein, an NS5A protein, and an NS5B protein, respectively, and a 3′ untranslated region of a hepatitis C virus genome;

[0087] a nucleic acid (HCV full-genomic replicon RNA) that further comprises a Core protein coding region, an E1 protein coding region, an E2 protein coding region, a p7 protein coding region, and an NS2 protein coding region in addition to a 5′ untranslated region, sequences encoding an NS3 protein, an NS4A protein, an NS4B protein, an NS5A protein, and an NS5B protein, respectively, and a 3′ untranslated region of a hepatitis C virus genome; or

[0088] a nucleic acid that comprises the nucleotide sequence shown in SEQ ID NO: 12 or 13 in the Sequence Listing, or

[0089] a nucleic acid that comprises a nucleotide sequence encoding an amino acid sequence with one or more amino acid substitutions selected from the group consisting of M(1205)K, F(1548)L, C(1615)W, T(1652)N, A(2195)T, A(2218)S, H(2223)Q, Q(2281)R, K(2520)N, and G(2374)S, as defined using the amino acid sequence shown in SEQ ID NO: 6 in the Sequence Listing as a reference sequence, in the amino acid sequence shown in SEQ ID NO: 5 or 6 in the Sequence Listing.

[0090] Typical examples of the transformed cells according to the present invention capable of producing infectious HCV particles include full-length chimeric replicon RNA and transformed cells into which such a full-length chimeric replicon RNA has been introduced, wherein the full-length chimeric replicon RNA comprises the JFH-1 strain-derived 5′ untranslated region; the J6CF strain-derived Core protein coding region, E1 protein coding region, E2 protein coding region, and p7 protein coding region; the JFH-1 strain-derived NS2 protein coding region; and furthermore, a nucleotide sequence encoding an amino acid sequence wherein one or more and preferably any one of the above amino acid substitutions have been introduced into the HCV JFH-2.1 strain- or HCV JFH-2.3 strain-derived NS3 protein coding region, NS4A protein coding region, NS4B protein coding region, NS5A protein coding region, NS5B protein coding region, and 3′ untranslated region.

[0091] The viral particle-producing capacity of such transformed cells can also be detected using antibodies against HCV proteins (e.g., a Core protein, an E1 protein, or an E2 protein) composing HCV viral particles released into medium (culture solution). Also, the presence of HCV viral particles can also be indirectly detected by amplifying and detecting HCV replicon RNA contained in HCV viral particles in a culture solution by RT-PCR using specific primers.

[0092] HCV particles produced by the above transformed cells are infectious to cells (preferably, HCV-sensitive cells). In the present invention, the term “HCV-sensitive cells” refers to cells that are infected with HCV. Such HCV-sensitive cells are preferably hepatic cells or lymphoid lineage cells, but the examples are not limited to them. Specific examples of hepatic cells include primary hepatic cells, Huh7 cells, HepG2 cells, IMY-N9 cells, HeLa cells, and 293 cells. Specific examples of lymphoid lineage cells include Molt4 cells, HPB-Ma cells, and Daudi cells. However, the examples are not limited to these cells.

[0093] Whether or not the prepared HCV particles are infectious can be determined by treating HCV permissive cells (e.g., Huh-7) using a culture supernatant obtained by culturing the above transformed cells (into which HCV replicon RNA has been introduced), immunostaining the cells after a given time period (e.g., after 48 hours) with an anti-Core antibody, and then determining the number of infected cells. Alternatively, determination can be made by subjecting a cell extract to electrophoresis on SDS-polyacrylamide gel, detecting the Core protein by Western blotting, and thus detecting infected cells.

[0094] The present invention also relates to a method for preparing HCV particles by culturing the above transformed cells capable of producing infectious HCV particles and then preferably obtaining (e.g., collecting a culture supernatant) HCV particles released into medium (preferably, culture solution). The present invention provides HCV particles obtained by the method and preferably infectious HCV particles. The HCV particles also infect HCV-sensitive animals such as chimpanzees, so as to be able to induce HCV-derived hepatitis.

### (5) Use of Subgenomic Replicon RNA

[0095] Transformed cells into which the HCV subgenomic replicon RNA according to the present invention has been introduced can be used for screening for a compound that inhibits the replication of the HCV subgenomic replicon RNA.

[0096] More specifically, for example, RNA in which, in the 5′ to 3′ direction, 5′ UTR, a sequence ranging from the 5′ terminus to nucleotide 36 of a Core coding region, a luciferase gene (marker gene), an encephalomyocarditis virus IRES sequence, an NS3 region, an NS4A region, an NS4B region, an NS5A region, and an NS5B region, and 3′ UTR are ligated in this order is introduced into Huh7 cells. Subsequently, the cells are treated with a compound to be screened. After 48 to 72 hours, luciferase activity is measured. A compound that suppresses luciferase activity compared with a group not treated with the compound is considered to have effects of suppressing the replication of the HCV subgenomic replicon RNA. Accordingly, it can also be determined that which compound may have the activity of suppressing replication on HCV of the same genotype as that of an HCV strain from which the replicon RNA or particularly the NS3-to-NS5B regions are derived or on HCV that is observed in a patient or the like with an HCV-related disease from which the relevant HCV strain has been isolated.

### (6) Use of HCV Particles

[0097] The HCV particles of the present invention can also be used for screening for an antibody or a compound inhibiting HCV infection.

[0098] The HCV particles according to the present invention are also preferably used as vaccines or antigens for preparation of anti-HCV antibodies.

[0099] Specifically, the HCV particles according to the present invention can be used as vaccines without modification. The HCV particles can also be attenuated or inactivated via a method known in the art and then used. The virus can be inactivated by adding and mixing an inactivator such as formalin, β-propiolactone, or glutardialdehyde with, for example, a virus suspension and allowing the inactivator to react with the virus (Appaiahgari, M. B. & Vrati, S., Vaccine, 22: 3669-3675, 2004).

[0100] The vaccine can be formulated into a dosage form that can be administered, such as a solution or suspension. The vaccine can be prepared in a solid state that is suitable for dissolution or suspension it in a solution. Alternatively, such a preparation can be emulsified or encapsulated in liposomes.

[0101] Active immunogenic ingredients, such as HCV particles, are often mixed with excipients that are pharmaceutically acceptable and compatible with the active ingredients to be used herein. Examples of adequate excipients include water, physiological saline, dextrose, glycerol, ethanol, and a mixture thereof. Further, the vaccine can contain a minor amount of an auxiliary agent (e.g., a humidifier or an emulsifier), a pH buffer, and/or an adjuvant that enhances vaccine efficacy. Examples of the effective adjuvant include, but are not limited to, aluminum hydroxide, N-acetyl-muramyl-L-threonyl-D-isoglutamine (thr-MDP), N-acetyl-nor-muramyl-L-alanyl-D-isoglutamine (referred to as CGP11637, nor-MDP), N-acetylmuramyl-L-alanyl-D-isoglutaminyl-L-alanine-2-(1′-2′-dipalmitoyl-sn-glycero-3-hydroxyphosphoryloxy)-ethylamine (referred to as CGP19835A, MTP-PE), and RIBI. RIBI comprises three components extracted from bacteria; i.e. monophosphoryl lipid A, trehalose dimycolate, and a cell wall skeleton (HPL+TDM+CWS), in 2% squalene/Tween® 80 emulsion. Effects of an adjuvant can be determined by measuring the amount of antibodies resulting from administration of a vaccine comprising HCV particles.

[0102] The vaccine is generally administered parenterally, by injection such as subcutaneous injection or intramuscular injection, for example. Examples of other formulations that are suitable as other forms of dosage include suppositories and oral preparations.

[0103] One or more compounds having adjuvant activity can be added to an HCV vaccine. An adjuvant is a non-specific stimulant to the immune system. Such substance enhances the immune response of a host against HCV vaccines. Specific examples of adjuvants that are known in the art include Freund's complete and incomplete adjuvants, vitamin E, a nonionic block polymer, muramyl dipeptide, saponin, mineral oil, vegetable oil, and Carbopol. Examples of adjuvants particularly suitable for transmucosal administration include E. coli heat-labile toxin (LT) and cholera toxin (CT). Examples of other adequate adjuvants include aluminum hydroxide, aluminum phosphate or aluminum oxide, an oil emulsion (e.g., Bayol® or Marcol 5®), saponin, and a vitamin E solubilizate. Accordingly, the vaccine of a preferable embodiment of the present invention comprises an adjuvant.

[0104] Concerning an injectable solution for subcutaneous, intracutaneous, intramuscular, or intravenous administration, other specific examples of a pharmaceutically acceptable carrier or diluent that is used for administration in combination with the HCV vaccine of the present invention in the injectable solution include a stabilizer, a carbohydrate (e.g., sorbitol, mannitol, starch, sucrose, glucose, or dextran), a protein (e.g., albumin or casein), a protein-containing substance (e.g., bovine serum or skimmed milk), and buffer (e.g., phosphate buffer).

[0105] Examples of conventional binders and carriers that are used for suppositories can include polyalkylene glycol and triglyceride. Such a suppository can be prepared from a mixture comprising 0.5% to 50%, and preferably 1% to 20% active ingredients. Oral preparations comprise excipients that are generally used. Examples of excipients include mannitol, lactose, starch, magnesium stearate, saccharin sodium, cellulose, and magnesium carbonate of pharmaceutical grade.

[0106] The vaccine of the present invention can be in the form of a solution, suspension, tablet, pill, capsule, sustained-release preparation, or powder, and its active ingredients (viral particles or a part thereof) account for 10% to 95%, and preferably 25% to 70% thereof.

[0107] The vaccine of the present invention is administered in a manner suitable for a dosage form and in an amount that can exert preventive and/or therapeutic effects. The amount to be administered generally ranges from 0.01 μg to 100,000 μg of an antigen per dose. Such amount varies depending on the patient to be treated, the capacity of the patient for antibody synthesis in the immune system, and the desired degree of protection. Also, the amount varies depending on the route of administration, such as oral, subcutaneous, intracutaneous, intramuscular, or intravenous administration.

[0108] The vaccine of the present invention can be administered according to a single-administration schedule, and preferably according to a multiple-administration schedule. In the case of a multiple-administration schedule, 1 to 10 separate administrations are performed at the time of initiation of vaccine inoculation, and another administration can then be performed with a time interval that is necessary for maintaining or enhancing the immune response. For example, the second administration can be performed 1 to 4 months after the first. Where needed, administration may be subsequently performed several months after the first. The administration regimen is, at least partially, determined according to the needs of individual patient, and the regimen depends on the judgment made by a doctor.

[0109] Further, the vaccine comprising the HCV particles of the present invention may be administered with another immunological agent (e.g., immunoglobulin).

[0110] Further, the HCV particle vaccine of the present invention can be used preventively against possible new HCV infection via administration to healthy individuals to induce immune response to HCV. The HCV particle vaccine of the present invention can also be used as a therapeutic vaccine to induce strong immune response to HCV in vivo to eliminate HCV via administration to patients infected with HCV, via administration to patients infected with HCV.

[0111] The HCV particles of the present invention are also useful as antigens to be used for preparing anti-HCV antibodies. HCV particles to be used as antigens desirably have higher purity. Cells or cell debris are removed from a culture solution containing HCV particles by centrifugation and/or using a filter or the like. Such a solution from which cell debris has been removed can also be concentrated about 10- to 100-fold using ultrafiltration membrane having a molecular weight cut off ranging from 100,000 to 500,000. Such a solution containing HCV particles, from which cell debris has been removed, can be purified by chromatography (e.g., gel filtration chromatography, ion exchange chromatography, and affinity chromatography) and density-gradient centrifugation in combination in any order or alone.

### (7) Antibodies Against HCV Particles

[0112] The present invention also provides antibodies against HCV particles obtained in (4) above. Preferable examples of such an antibody include particularly antibodies against HCV particles having the structural proteins (Core, E1, E2, and p7) of the JFH-2.1 or JFH-2.3 strain. More specifically, examples of antibodies against HCV particles having the structural proteins (Core, E1, E2, and p7) of the JFH-2.3 strain are antibodies against HCV particles produced by transformed cells that are obtained by introducing the HCV replicon RNA encoding: the amino acid sequence ranging from amino acid positions 1 to 191 of SEQ ID NO: 6 in the Sequence Listing as a Core protein; the amino acid sequence ranging from amino acid positions 192 to 384 of the same as an E1 protein; the amino acid sequence ranging from amino acid positions 385 to 751 of the same as an E2 protein; and the amino acid sequence ranging from amino acid positions 752 to 814 as a p7 protein.

[0113] Antibodies can be prepared by administering the HCV particles of the present invention to mammalians or birds. Examples of mammalians include mice, rats, rabbits, goats, sheep, horses, cattle, guinea pigs, dromedaries, bactrian camels, and lamas. Dromedaries, bactrian camels, and lamas are suitable for preparing an antibody consisting of the H chain alone. Examples of birds include chickens, geese and ostriches. The blood serum may be taken from an animal to which the HCV particles of the present invention have been administered and then antibodies can be obtained therefrom by well-known methods.

[0114] Hybridomas that produce monoclonal antibody-producing cells can be prepared with the use of cells of the animals immunized with the HCV particles of the present invention. Methods for producing hybridomas are well-known in the art, and the method described in, for example, Antibodies: A Laboratory Manual (Cold Spring Harbor Laboratory, 1988) can be employed.

[0115] Monoclonal antibody-producing cells may be prepared via cell fusion or via other methods involving introduction of DNA of a cancer gene or infection with Epstein-Barr virus for immortalization of B lymphocytes.

[0116] More specifically, procedures for preparing an anti-HCV monoclonal antibody by administering HCV particles to mice are as described below. Generally 4- to 10-week-old mice are immunized with HCV particles as antigens, but a purification step may be omitted if necessary. Immunization is generally carried out by administering an antigen several times subcutaneously or intraperitoneally with an adjuvant. Examples of such an adjuvant include, but are not limited to, Freund's complete and incomplete adjuvants, aluminium hydroxide gel, Hemophilus pertussis vaccine, Titer Max Gold (Vaxel), and GERBU adjuvant (GERBU Biotechnik). Final immunization is carried out by administering HCV particles intravenously or intraperitoneally without administering any adjuvant. On days 3 to 10 after the final immunization with HCV particles and preferably on day 4, the spleen was excised from an immunized mouse according to a known method (Antibodies: A Laboratory Manual Cold Spring Harbor Laboratory, 1988).

[0117] A method that is employed herein involves preparation of spleen cells from the spleen and fusion of spleen cells to myeloma cells, so as to prepare hybridoma cells producing a monoclonal antibody. As myeloma cells to be used for cell fusion, any myeloma cells may be used, as long as they are replicable in vitro. Examples of such myeloma cells include mouse-derived established cell lines such as 8-azaguanine resistant mouse (BALB/c-derived) myeloma cell lines (e.g., P3-X63Ag8-U1(P3-U1), SP2/0-Ag14(SP2/0), P3-X63-Ag8653(653), P3-X63-Ag8(X63), and P3/NS1/1-Ag4-1(NS1)). These cell lines are available from the RIKEN BioResource Center, ATCC (American Type Culture Collection), or ECACC (European Collection of Cell Cultures). Culture and subculture are carried out according to known methods (Antibodies: A Laboratory Manual Cold Spring Harbor Laboratory, 1988, Selected Methods in Cellular Immunology W.H. Freeman and Company, 1980).

[0118] The thus obtained spleen cells and myeloma cells are washed and then mixed at a ratio of 1 (myeloma cells): 1-10 (spleen cells), followed by cell fusion reaction. As a fusion accelerator, polyethylene glycol, polyvinyl alcohol, or the like with an average molecular weight ranging from 1000 to 6000 can be used. Also, cells can also be fused using a commercially available cell fusion apparatus using electrical stimulation (e.g., electroporation).

[0119] After cell fusion, cells are suspended in medium and then washed. Cells are washed using medium used for culturing myeloma cells, such as Dulbecco's modified Eagle's medium or RPMI-1640 medium. Medium for culturing fused cells is supplemented with a HAT supplement in order to selectively obtain only target fused cells. Limiting dilution (after dilution to 10³ to 10⁷ cells/ml, cells are seeded into a 96-well cell culture microplate at 10² to 10⁶ cells/well) or cloning is carried out by a colony formation method in methylcellulose medium.

[0120] Hybridomas can be screened for by a general method and the method is not particularly limited. For example, a portion of the culture supernatant is collected, the supernatant is added to an immobilized HCV protein, and then a labeled secondary antibody is added for incubation. The binding ability may be measured by enzyme-linked immunosorbent assay (ELISA) or radioimmunoassay (RIA) or subjected to dot blot analysis or western blot analysis. A hybridoma line confirmed to produce an antibody that reacts with a target antigen is selected as a hybridoma line producing a monoclonal antibody.

[0121] Moreover, hybridomas producing an anti-HCV monoclonal antibody having activity of inhibiting HCV infection can be selected by a method for measuring the activity of inhibiting HCV infection using infectious HCV particles as described in the following example.

[0122] First, infectious HCV particles (the method for preparing HCV particles is as described above) and an antibody sample are mixed and then allowed to react at 37° C. for 1 hour. The sample (50 μl) is added to Huh7 cells cultured on the day before mixing, in a 96-well plate at 5×10³ cells/well and then cells are cultured at 37° C. for 2.5 hours. After culture, the sample is removed, cells are washed with PBS, fresh medium is added, and then cells are cultured continuously. After 48 hours, the culture supernatant is removed, the resultant is washed once with PBS, 100 μl of ISOGEN (Nippon Gene) is added, and then RNA is prepared from the cells. After quantification of RNA, the amount of HCV genomic RNA is measured. Detection of HCV RNA by quantitative RT-PCR is carried out by detecting the RNA of the 5′ untranslated region of HCV RNA according to the method of Takeuchi et al. (Takeuchi T. et al., Gastroenterology, 116: 636-642, 1999).

[0123] Another method for evaluating the activity of inhibiting HCV infection is as follows. First, an antibody sample and infectious HCV particles are mixed and then allowed to react at 37° C. for 1 hour. Next, 50 μl of the above sample is added to Huh-7 cells cultured on the day before mixing in a 96-well plate at 1×10⁴ cells/well and then cells are cultured at 37° C. for 2.5 hours. After culture, the sample is removed, cells are washed with PBS, fresh medium is added, and then cells are continuously cultured. After 72 hours, the culture supernatant is removed, and then the plate is placed in ice-cooled methanol, so that cells are immobilized. Subsequently, methanol is removed by air drying and then cells are solubilized using BlockAce® (Dainippon Pharmaceutical) containing 0.3% Triton®-X 100 (GE Healthcare). HCV-infected cells are counted under fluorescence microscopy (Olympus Corporation, IX-70) using a clone 2H9 anti-HCV-Core antibody (see Nat. Med. (2005) 11: p791-6.) and goat anti-mouse IgG-Alexa488 (Molecular Probes). Samples in wells in which HCV infection has been inhibited are confirmed to be positive clones, so that target hybridomas can be selected. A monoclonal antibody that is produced by hybridomas selected as described above is a preferred embodiment of the antibody of the present invention.

[0124] The monoclonal or polyclonal antibodies obtained by such techniques are useful for diagnosis, therapy, and prevention of HCV. If an antibody is from an animal, a chimeric antibody formed with a human antibody can be prepared. A particularly preferable chimeric antibody is a humanized antibody (human-type antibody) or the like prepared by transplanting the sequence of a hypervariable site of a mouse antibody into a human antibody. Such a humanized antibody is particularly useful for therapy or prevention of HCV.

[0125] The antibodies prepared with the use of the HCV particles of the present invention may be administered with pharmaceutically acceptable solubilizers, additives, stabilizers, buffers, or the like. Such antibodies may be administered via any route. Subcutaneous, intracutaneous, or intramuscular administration is preferable, and intravenous administration is more preferable.

[0126] The present invention can be performed using molecular biological and immunological techniques within the general technical scope of the relevant field. Such techniques are sufficiently explained in various documents including known experimental protocols and the like. For example, such techniques are described in detail in Sambrook et al., Molecular Cloning: A Laboratory Manual (vol. 3, 2001), Ed Harlow et al., Antibodies: A Laboratory Manual (1988).

### (8) Short Time Production of HCV Viral Particles Using Mutant HCV RNA-Replicating Cells

[0127] The nucleic acid according to the present invention, such as the mutant HCV replicon RNA or DNA encoding the mutant RNA, and preferably nucleic acids such as chimeric mutant HCV replicon RNAs derived from 2 or more HCV strains or DNAs encoding the RNAs may further comprise nucleotide substitutions that cause amino acid substitutions.

[0128] In an embodiment, a nucleic acid such as mutant HCV replicon RNA that is a chimera of the HCV J6 strain and the HCV JFH-2.1 strain or DNA encoding the RNA and preferably J6/JFH-2.1 A2217S RNA that is chimeric mutant HCV replicon RNA having the nucleotide sequence shown in SEQ ID NO: 12 or DNA encoding the RNA may comprise a nucleotide substitution that causes substitution of 1 or 2 or more amino acids and particularly preferably 7 or more amino acids. The amino acid substitutions may be, but is not limited to, at least 1, preferably 2 or more, further preferably 3 or 4 or more, and particularly preferably 7 or 8 amino acid substitutions selected from the group consisting of A→T at position 148 (Core region), M→V at position 356 (E1 region), M→K at position 405, N→T at position 417 and V→G at position 626 (E2 region), M→T at position 868 (NS2 region), T→A at position 1642 (NS3 region), I→V at position 1687 (NS4A region), I→V at position 1722 and K→R at position 1767 (NS4B region), S→G at position 2204 and C→S at position 2219 (NS5A region), T→I at position 2695 and L→P at position 3016 (NS5B region), as defined using the amino acid sequence (SEQ ID NO: 88) of the precursor protein encoded by J6/JFH-2.1 A2217S RNA as a reference sequence. For example, J6/JFH-2.1 A2217S RNA or DNA encoding the RNA may have nucleotide substitutions that cause 2 or more (preferably 3 or 4 or more), for example, or all the 7 amino acid substitutions selected from the group consisting of M→K at position 405, N→T at position 417, M→T at position 868, T→A at position 1642, I→V at position 1722, S→G at position 2204, and T→I at position 2695. Alternatively, J6/JFH-2.1 A2217S RNA or DNA encoding the RNA may have nucleotide substitutions that cause 2 or more (preferably 3 or 4 or more), for example, all the 8 amino acid substitutions selected from the group consisting of A→T at position 148, M→V at position 356, V→G at position 626, I→V at position 1687, K→R at position 1767, C→S at position 2219, T→I at position 2695, and L→P at position 3016. Cells, into which the RNA of a multiple mutant replicon having a nucleotide substitution that causes such an additional amino acid substitution (e.g., a mutant HCV replicon that is a chimera of the HCV J6 strain with the HCV JFH-2.1 strain or the JFH-2.3 strain) or DNA encoding the RNA has been introduced, initiate the production of viral particles relatively immediately after the initiation of replication, and then can stably produce viral particles in large amounts for dozens of days (e.g., 40 days). Therefore, if such a mutant replicon is used, viral particles can be produced in large amounts within a short period after the initiation of replication. The present invention also provides such advantageous multiple mutant HCV replicon RNA or DNA encoding the RNA. The present invention also provides an expression vector comprising the DNA that encodes the multiple mutant HCV replicon RNA and recombinant cells into which the vector has been introduced. The present invention also provides cells into which the multiple mutant replicon RNA has been introduced. As the cells according to the present invention, into which such a multiple mutant replicon is introduced, hepatic cell-derived cells or lymphoid lineage cells can be used, for example. Examples of hepatic cell-derived cells include, but are not limited to, Huh7 cells, Huh7 cells, HepG2 cells, IMY-N9 cells, HeLa cells, and 293 cells. Examples of lymphoid lineage cells include, but are not limited to, Molt4 cells, HPB-Ma cells, and Daudi cells.

[0129] Cells into which the multiple mutant replicon has been introduced are cultured for a relatively short time period, so that viral particles can be efficiently produced in large amounts. The culture period may be 1 or more days, more preferably 2 or more days, even more preferably 3 or more days, further preferably 5 or more days, and particularly preferably 10 or more days from the initiation of culture, for example. The culture period may be 60 or less days, more preferably 50 or less days, even more preferably 40 or less days, further preferably 30 or less days, and particularly preferably 20 or less days from the initiation of culture. Whereas cells into which an HCV replicon has been introduced are generally known to tend to drastically decrease once their production amount of viral particles from the early to the middle periods after the initiation of replication, the cells according to the present invention into which the multiple mutant HCV replicon has been introduced is very advantageous in that they can stably produce viral particles in large amounts within a short time period. The present invention also provides a method for producing HCV viral particles using cells according to the present invention into which the multiple mutant replicon RNA or DNA encoding the RNA has been introduced.

### (9) Summary of Sequences

[0130] In addition, sequences specified by SEQ ID NOS: in the present application are summarized as follows.

SEQ ID NO: 1: nucleotide sequence containing the portion ranging from T7 promoter to 3′ UTR in recombinant plasmid pSGR-JFH-2.1
SEQ ID NO: 2: nucleotide sequence containing the portion ranging from T7 promoter to 3′ UTR in recombinant plasmid pSGR-JFH-2.3
SEQ ID NO: 3: full-length genome sequence (nucleotide sequence encoding full-length genomic RNA) of the HCV JFH-2.1 strain
SEQ ID NO: 4: full-length genome sequence (nucleotide sequence encoding full-length genomic RNA) of the HCV JFH-2.3 strain SEQ ID NO: 5: amino acid sequence of the precursor protein of the HCV JFH-2.1 strain
SEQ ID NO: 6: amino acid sequence of the precursor protein of the HCV JFH-2.3 strain
SEQ ID NO: 7: nucleotide sequence of the structural region (containing Core, E1, E2, and p7) of the HCV J6CF strain
SEQ ID NO: 8: nucleotide sequence of 5′ UTR of the HCV JFH-1 strain
SEQ ID NO: 9: nucleotide sequence of the NS2 region of the HCV JFH-1 strain
SEQ ID NO: 10: sequence ranging from the NS3 region to the 3′ UTR (containing NS3, NS4A, NS4B, NS5A, and NS5B regions and 3′ UTR) of the HCV JFH-2.1 strain
SEQ ID NO: 11: nucleotide sequence of chimeric HCV genome sequence J6/JFH-2.1
SEQ ID NO: 12: nucleotide sequence of chimeric HCV genome sequence J6/JFH-2.1 A2217S
SEQ ID NO: 13: nucleotide sequence of mutant HCV genome sequence JFH-2.1 A2218S
SEQ ID NO: 14: amino acid sequence of the NS3-to-NS5B regions of the precursor protein of the HCV JFH-2.1 strain
SEQ ID NO: 15: amino acid sequence of the NS3-to-NS5B regions of the precursor protein of the HCV JFH-2.3 strain
SEQ ID NOS: 16-77: primers
SEQ ID NO: 78: nucleotide sequence of mutant chimeric HCV genome sequence J6/JFH-2.1 A2217S(CS)
SEQ ID NO: 79: nucleotide sequence of mutant chimeric HCV genome sequence J6/JFH-2.1 A2217S (LP)
SEQ ID NO: 80: nucleotide sequence of mutant chimeric HCV genome sequence J6/JFH-2.1 A2217S (TI)
SEQ ID NO: 81: nucleotide sequence of mutant chimeric HCV genome sequence J6/JFH-2.1 A2217S(CS/LP)
SEQ ID NO: 82: nucleotide sequence of mutant chimeric HCV genome sequence J6/JFH-2.1 A2217S(CS/TI)
SEQ ID NO: 83: nucleotide sequence of mutant chimeric HCV genome sequence J6/JFH-2.1 A2217S (TI/LP)
SEQ ID NO: 84: nucleotide sequence of mutant chimeric HCV genome sequence J6/JFH-2.1 A2217S(CS/TI/LP)
SEQ ID NO: 85: nucleotide sequence of mutant chimeric HCV genome sequence J6/JFH-2.1 A2217S (AT/CS/TI/LP)
SEQ ID NO: 86: nucleotide sequence of mutant chimeric HCV genome sequence J6/JFH-2.1 A2217S (TI/MT/MK/NT/IV/SG/TA)
SEQ ID NO: 87: nucleotide sequence of mutant chimeric HCV genome sequence J6/JFH-2.1 A2217S (AT/CS/TI/LP/MV/VG/IV/KR)
SEQ ID NO: 88: amino acid sequence of the precursor protein encoded by J6/JFH-2.1 A2217S
SEQ ID NO: 89: amino acid sequence of the precursor protein encoded by J6/JFH-2.1 A2217S(CS)
SEQ ID NO: 90: amino acid sequence of the precursor protein encoded by J6/JFH-2.1 A2217S (LP)
SEQ ID NO: 91: amino acid sequence of the precursor protein encoded by J6/JFH-2.1 A2217S (TI)
SEQ ID NO: 92: amino acid sequence of the precursor protein encoded by J6/JFH-2.1 A2217S(CS/LP)
SEQ ID NO: 93: amino acid sequence of the precursor protein encoded by J6/JFH-2.1 A2217S(CS/TI)
SEQ ID NO: 94: amino acid sequence of the precursor protein encoded by J6/JFH-2.1 A2217S (TI/LP)
SEQ ID NO: 95: amino acid sequence of the precursor protein encoded by J6/JFH-2.1 A2217S(CS/TI/LP)
SEQ ID NO: 96: amino acid sequence of the precursor protein encoded by J6/JFH-2.1 A2217S (AT/CS/TI/LP)
SEQ ID NO: 97: amino acid sequence of the precursor protein encoded by J6/JFH-2.1 A2217S (TI/MT/MK/NT/IV/SG/TA)
SEQ ID NO: 98: amino acid sequence of the precursor protein encoded by J6/JFH-2.1 A2217S (AT/CS/TI/LP/MV/VG/IV/KR)

[0131] All publications, patents, and patent applications cited herein are incorporated herein by reference in their entirety.

### EXAMPLES

[0132] The present invention is further illustrated with reference to the following examples. However, these examples do not limit the technical scope of the present invention.

### Example 1

### Construction of JFH-2.1 Strain- and JFH-2.3 Strain-Derived HCV Subgenomic Replicon RNA Expression Vectors

[0133] HCV subgenomic replicon RNA expression vectors, plasmid pSGR-JFH-2.1 and pSGR-JFH-2.3, were separately constructed using nonstructural region of the full-length genome clone DNA of the HCV JFH-2.1 strain and JFH-2.3 strain of genotype 2a isolated from fulminant hepatitis patients (FIG. 1) as follows. FIG. 1A shows the full-length genome structure of the HCV JFH-2.1 strain and JFH-2.3 strain.

[0134] Plasmids, pSGR-JFH-2.1 and pSGR-JFH-2.3, were constructed according to the procedures described in the document of Kato et al. (Gastroenterology, 125: 1808-1817, 2003) and WO05028652A1. Specifically, first, recombinant plasmids, pJFH-2.1 and pJFH-2.3, were provided, wherein cDNA encoding the full-length genome of the HCV JFH-2.1 strain or JFH-2.3 strain was inserted under control of a T7 promoter in a plasmid vector pUC19. Subsequently, structural region and portions of nonstructural region in recombinant plasmids, pJFH-2.1 and pJFH-2.3 were substituted with a neomycin resistance gene (neo; also referred to as neomycin phosphotransferase gene) and EMCV-IRES (encephalomyocarditis virus internal ribosome entry site). Cleavage was carried out with restriction enzymes to excise inserted fragments and then the fragments were cloned into recombinant vectors to separately construct plasmids, pSGR-JFH-2.1 and pSGR-JFH-2.3.

[0135] FIG. 1B and FIG. 1C show the structures of the plasmid vectors, pSGR-JFH-2.1 and pSGR-JFH-2.3. In FIG. 1B and FIG. 1C, “T7” denotes a T7 promoter. The T7 promoter is a sequence element required for expression of HCV subgenomic replicon RNA using T7 RNA polymerase from each plasmid vector. In the plasmid vectors, pSGR-JFH-2.1 and pSGR-JFH-2.3, 5′ UTR, NS3-NS5B coding regions, and 3′ UTR are sequences from the HCV JFH-2.1 or JFH-2.3 strain. Herein, “neo” denotes a neomycin resistance gene and “EMCV IRES” denotes an encephalomyocarditis virus internal ribosome-binding site. HCV subgenomic replicon RNA that is expressed from these vectors is RNA transcribed from regions downstream of the T7 promoter, as shown in FIG. 1D.

[0136] The nucleotide sequences consisting of a T7 promoter and the HCV subgenomic replicon RNA coding region ligated downstream thereof, in pSGR-JFH-2.1 and pSGR-JFH-2.3, are shown in SEQ ID NOS: 1 and 2, respectively.

[0137] In addition, the full-length genome sequences of the HCV JFH-2.1 strain and JFH-2.3 strain used herein are shown in SEQ ID NOS: 3 and 4, respectively. The amino acid sequences of virus precursor proteins (polyproteins) encoded by the full-length genome sequences of the HCV JFH-2.1 and JFH-2.3 strains are shown in SEQ ID NOS: 5 and 6, respectively. The amino acid sequence shown in SEQ ID NO: 5 is encoded by nucleotide positions 341 to 9445 (including termination codon) of the nucleotide sequence of SEQ ID NO: 3. The amino acid sequence shown in SEQ ID NO: 6 is encoded by nucleotide positions 341 to 9445 (including termination codon) of the nucleotide sequence of SEQ ID NO: 4. Also, the amino acid sequences of NS3-to-NS5B regions in precursor proteins of the HCV JFH-2.1 strain and JFH-2.3 strain are shown in SEQ ID NO: 14 and 15, respectively. The amino acid sequence of SEQ ID NO: 14 (NS3-NS5B regions) corresponds to amino acid positions 1032 to 3034 of SEQ ID NO: 5. Also, the amino acid sequence of SEQ ID NO: 15 (NS3-NS5B regions) corresponds to amino acid positions 1032 to 3034 of SEQ ID NO: 5. Here, as shown in FIG. 1B and FIG. 1C, whereas the sequence of amino acid positions 1205 to 1206 (in NS3 region) of the precursor protein (SEQ ID NO: 5) of the HCV JFH-2.1 strain is alanine (A)-isoleucine (I), the sequence of amino acid positions 1205 to 1206 (in NS3 region) of the precursor protein (SEQ ID NO: 6) of the HCV JFH-2.3 strain is methionine (M)-leucine(L).

### Example 2

### Preparation of HCV Subgenomic Replicon RNA

[0138] For preparation of HCV subgenomic replicon RNA, expression vectors, pSGR-JFH-2.1 and pSGR-JFH-2.3, constructed as described in Example 1 were each cleaved with restriction enzyme Xba I, thereby preparing template DNA for PCR. Subsequently, each of these Xba I cleavage fragments were incubated at 30° C. for 30 minutes after addition of Mung Bean Nuclease 20 U (total volume of reaction solution: 50 μl) to 10 μg to 20 μg of the template DNA for enzyme treatment. Mung Bean Nuclease is an enzyme that catalyzes a reaction of selectively degrading and blunt-ending the single-stranded portion of the double-stranded DNA. In general, when RNA transcription is carried out with RNA polymerase by directly using as a template the above Xba I cleavage fragment, a replicon RNA in which extra CUGA (4 nucleotides) corresponding to a portion of the Xba I recognition sequence has been added at the 3′ terminus is synthesized. Hence, in this Example, the Xba I cleavage fragment was treated with Mung Bean Nuclease, so that 4 nucleotides of CUGA were removed from the Xba I cleavage fragment.

[0139] Next, the solution treated with Mung Bean Nuclease containing the Xba I cleavage fragment was subjected to protein removing treatment according to a conventional method to purify the Xba I cleavage fragment from which 4 nucleotides of CUGA had been removed for using as template DNA in the next reaction. From the template DNA, RNA was synthesized in vitro by T7 promoter-based transcription reaction using MEGAscript (Ambion). Specifically, 20 μl of a reaction solution containing 0.5 μg to 1.0 μg of the template DNA was prepared according to the manufacturer's instruction, followed by 3 to 16 hours of reaction at 37° C.

[0140] After completion of RNA synthesis, DNase (2U) was added to the reaction solution for 15 minutes of reaction at 37° C. to remove the template DNA. RNA extraction was further carried out using acid phenol, so that HCV subgenomic replicon RNAs transcribed from pSGR-JFH-2.1 and pSGR-JFH-2.3 were obtained.

### Example 3

### Establishment of HCV Subgenomic Replicon-Replicating Cell Clones

[0141] Each (1 μg) synthetic HCV subgenomic replicon RNA from the JFH-2.1 strain or the JFH-2.3 strain prepared in Example 2 was mixed with total cellular RNA extracted from Huh7 cells by a conventional method to adjust the total amount of RNA to 10 μg. Then, the mixed RNA was introduced into Huh7 cells by electroporation. The electroporated Huh7 cells were seeded on a culture dish and cultured for 16 to 24 hours, and then G418 (neomycin) was added to the culture dish. Then, the culture was continued while replacing the culture medium twice a week. After 21 days of culture following seeding, viable cells were stained with crystal violet. As a result, colony formation could be confirmed as shown in FIG. 2 for cells into which replicon RNA from either the JFH-2.1 or JFH-2.3 strain had been introduced. The colony formation indicated that a HCV subgenomic replicon RNA had been replicated in the cells.

[0142] Regarding the above replicon RNA-transfected cells for which colony formation was confirmed, colonies of viable cells were further cloned from the above culture dish after 21 days of the culture, and then the culture was continued. A plurality of cell clone strains could be established by such colony cloning These resulting cell clones were designated as JFH-2.1 subgenomic replicon cells and JFH-2.3 subgenomic replicon cells. It was considered that the introduced JFH-2.1 strain-derived subgenomic replicon RNA or JFH-2.3 strain-derived subgenomic replicon RNA self replicated in the thus established cell clones.

### Example 4

### Sequence Analysis of Replicon RNA in JFH-2.3 Subgenomic Replicon Cells

[0143] Sequence analysis was conducted for subgenomic replicon RNA present in JFH-2.3 subgenomic replicon cells established in Example 3. First, total RNA was extracted from the established 10 clones of JFH-2.3 subgenomic replicon cells and then HCV subgenomic replicon RNA contained therein was amplified by RT-PCR. For the amplification, 5′-TAATACGACTCACTATAG-3′ (SEQ ID NO: 16) and 5′-GCGGCTCACGGACCTTTCAC-3′ (SEQ ID NO: 17) were used as primers. The resulting amplification products were cloned into sequencing cloning vectors and then subjected to sequence analysis by a conventional method.

[0144] As a result, in the subgenomic replicon RNA obtained from within the cells, nucleotide substitutions causing amino acid substitutions of 4 positions in the NS3 region (M→K at position 1205, F→L at position 1548, C→W at position 1615, and T→N at position 1652), 5 positions in the NS5A region (A→T at position 2196, A→S at position 2218, H→Q at position 2223, Q→R at position 2281, and G→S at position 2373), 1 position in the NS5B region (K→N at position 2519), that are in the nonstructural region, were found (FIG. 3). Most of these amino acid substitutions were present within the NS3 region or the NS5A region, as described above. The positions of these amino acid substitutions are described based on the full-length amino acid sequence (SEQ ID NO: 6) of the precursor protein of the JFH-2.3 strain. Furthermore, the amino acid substitutions at position 2218 of clone 2 and at position 2223 of clone 3 took place within the ISDR region (interferon sensitivity determining region) (FIG. 3). In the amino acid sequence (SEQ ID NO: 6) of the precursor protein of the JFH-2.1/2.3 strain, the ISDR region corresponds to positions 2214 to 2249.

### Example 5

### Mutation Analysis of HCV Subgenome in JFH-2.3 Subgenomic Replicon Cells

[0145] To examine whether or not the nucleotide mutation found in Example 4 affected the replication of the subgenomic replicon RNA in cells, nucleotide substitutions causing amino acid substitutions at 3 positions within the NS3 region (F→L at position 1548, C→W at position 1615, and T→N at position 1652) and at 3 positions within the NS5A region (A→S at position 2218, H→Q at position 2223, and Q→R at position 2281) were each introduced into the HCV JFH-2.1 strain-derived subgenomic replicon RNA expression plasmid vector prepared in Example 1 (FIG. 4A).

[0146] Specifically, first, pSGR-JFH-2.1 was used as a template, 10 μl of 10× buffer and 4 μl of 2 mM dNTP mixture attached to the Phusion High-Fidelity DNA Polymerase kit (FINNZYMES), and 1 μl each of 10 μM primers EcoT7-F (5′-CCGGAATTCTAATACGACTC-3′ (SEQ ID NO: 18)) and 1548FL-R (5′-GGGCGTGTTGAGATACGCTCTAAGCCTGAC-3′ (SEQ ID NO: 19)) were added, and then deionized water was added to bring the total amount to 49.5 μl in the end. Thereafter, 0.5 μl of Phusion DNA Polymerase (FINNZYMES) was added thereto, and PCR was carried out. PCR was carried out for 30 cycles, with each cycle consisting of 98° C. for 10 seconds, 55° C. for 15 seconds, and 72° C. for 30 seconds. The resulting PCR product was designated as PCR product No. 1. Next, pSGR-JFH-2.1 was used as a template, 10 μl of 10× buffer and 4 μl of 2 mM dNTP mixture attached to the Phusion High-Fidelity DNA Polymerase kit (FINNZYMES) and 1 μl each of 10 μM primers 5563-R (5′-CTGCAGCAAGCCTTGGATCT-3′ (SEQ ID NO: 20)) and 1548FL-F (5′-TTAGAGCGTATCTCAACACGCCCGGCCTAC-3′ (SEQ ID NO: 21)) were added, and then deionized water was added to bring the total amount to 49.5 μl in the end. Thereafter, 0.5 μl of Phusion DNA Polymerase (FINNZYMES) was added thereto, and PCR was carried out. PCR was carried out for 30 cycles, with each cycle consisting of 98° C. for 10 seconds, 55° C. for 15 seconds, and 72° C. for 1 minute and 30 seconds. The resulting PCR product was designated as PCR product No. 2.

[0147] Those PCR products were each purified and dissolved in 15 μl of H₂O. DNAs of PCR product No. 1 and PCR product No. 2 were mixed in amounts of 1 μl each. The resultant was used as a template, 10 μl of 10× buffer and 4 μl of the 2 mM dNTP mixture attached to the Phusion High-Fidelity DNA Polymerase kit (FINNZYMES), and 1 μl each of 10 μM primers EcoT7-F (5′-CCGGAATTCTAATACGACTC-3′ (SEQ ID NO: 18)) and 5563-R (5′-CTGCAGCAAGCCTTGGATCT-3′ (SEQ ID NO: 20)) were added, and deionized water was added to bring the total amount to 49.5 μl in the end. Thereafter, 0.5 μl of Phusion DNA Polymerase (FINNZYMES) was added thereto, and PCR was carried out. PCR was carried out for 30 cycles, with each cycle consisting of 98° C. for 10 seconds, 55° C. for 15 seconds, and 72° C. for 2 minutes. The resulting PCR product was designated as PCR product No. 3. The PCR product was purified and then dissolved in 30 μl of H₂O.

[0148] pSGR-JFH-2.1 and the purified PCR product No. 3 were digested with the restriction enzymes EcoR I and EcoT22 I. Each HCV cDNA fragment was fractionated by agarose gel electrophoresis and then purified. These two DNA fragments were mixed with Ligation Mix (Takara Bio Inc.), and the two DNA fragments were ligated to each other. The thus obtained recombinant expression vector having a nucleotide substitution causing an amino acid substitution F→L at position 1548 was designated as pSGR-JFH-2.1 F1548L.

[0149] pSGR-JFH-2.1 was used as a template, 10 μl of 10× buffer and 4 μl of 2 mM dNTP mixture attached to the Phusion High-Fidelity DNA Polymerase kit (FINNZYMES), and 1 μl each of 10 μM primers EcoT7-F (5′-CCGGAATTCTAATACGACTC-3′ (SEQ ID NO: 18)) and 1615CW-R (5′-AGTCGGGCCAGCCACTTCCACATGGCGTCC-3′ (SEQ ID NO: 22)) were added, and then deionized water was added to bring the total amount to 49.5 μl in the end. Thereafter, 0.5 μl of Phusion DNA Polymerase (FINNZYMES) was added thereto, and PCR was carried out. PCR was carried out for 30 cycles, with each cycle consisting of 98° C. for 10 seconds, 55° C. for 15 seconds, and 72° C. for 30 seconds. The resulting PCR product was designated as PCR product No. 4. Next, pSGR-JFH-2.1 was used as a template, 10 μl of 10× buffer and 4 μl of 2 mM dNTP mixture attached to the Phusion High-Fidelity DNA Polymerase kit (FINNZYMES) and 1 μl each of 10 μM primers 5563-R (5′-CTGCAGCAAGCCTTGGATCT-3′ (SEQ ID NO: 20)) and 1615CW-F (5′-ATGTGGAAGTGGCTGGCCCGACTCAAGCCT-3′ (SEQ ID NO: 23)) were added, and then deionized water was added to bring the total amount to 49.5 μl in the end. Thereafter, 0.5 μl of Phusion DNA Polymerase (FINNZYMES) was added thereto, and PCR was carried out. PCR was carried out for 30 cycles, with each cycle consisting of 98° C. for 10 seconds, 55° C. for 15 seconds, and 72° C. for 1 minute and 30 seconds. The resulting PCR product was designated as PCR product No. 5.

[0150] PCR products were each purified and dissolved in 15 μl of H₂O. DNAs of PCR product No. 4 and PCR product No. 5 were mixed in amounts of 1 μl each. The resultant was used as a template, 10 μl of 10× buffer and 4 μl of the 2 mM dNTP mixture attached to the Phusion High-Fidelity DNA Polymerase kit (FINNZYMES), and 1 μl each of 10 μM primers EcoT7-F (5′-CCGGAATTCTAATACGACTC-3′ (SEQ ID NO: 18)) and 5563-R (5′-CTGCAGCAAGCCTTGGATCT-3′ (SEQ ID NO: 20)) were added, and deionized water was added to bring the total amount to 49.5 μl in the end. Thereafter, 0.5 μl of Phusion DNA Polymerase (FINNZYMES) was added thereto, and PCR was carried out. PCR was carried out for 30 cycles, with each cycle consisting of 98° C. for 10 seconds, 55° C. for 15 seconds, and 72° C. for 2 minutes. The resulting PCR product was designated as PCR product No. 6. The PCR product was purified and then dissolved in 30 μl of H₂O.

[0151] pSGR-JFH-2.1 and the purified PCR product No. 6 were digested with restriction enzymes EcoR I and EcoT22 I. Each HCV cDNA fragment was fractionated by agarose gel electrophoresis and then purified. These two DNA fragments were mixed with Ligation Mix (Takara Bio Inc.), and the two DNA fragments were ligated to each other. The thus obtained recombinant expression vector having a nucleotide substitution causing an amino acid substitution C→W at position 1615 was designated as pSGR-JFH-2.1 C1615W.

[0152] pSGR-JFH-2.1 was used as a template, 10 μl of 10× buffer and 4 μl of 2 mM dNTP mixture attached to the Phusion High-Fidelity DNA Polymerase kit (FINNZYMES), and 1 μl each of 10 μM primers EcoT7-F (5′-CCGGAATTCTAATACGACTC-3′ (SEQ ID NO: 18)) and 1652TN-R (5′-CTTGCATGCAATTGGCGATGTACTTCGTCC-3′ (SEQ ID NO: 24)) were added, and then deionized water was added to bring the total amount to 49.5 μl in the end. Thereafter, 0.5 μl of Phusion DNA Polymerase (FINNZYMES) was added thereto, and PCR was carried out. PCR was carried out for 30 cycles, with each cycle consisting of 98° C. for 10 seconds, 55° C. for 15 seconds, and 72° C. for 30 seconds. The resulting PCR product was designated as PCR product No. 7. Next, pSGR-JFH-2.1 was used as a template, 10 μl of 10× buffer and 4 μl of 2 mM dNTP mixture attached to the Phusion High-Fidelity DNA Polymerase kit (FINNZYMES) and 1 μl each of 10 μM primers 5563-R (5′-CTGCAGCAAGCCTTGGATCT-3′ (SEQ ID NO: 20)) and 1652TN-F (5′-GTACATCGCCAATTGCATGCAAGCTGACCT-3′ (SEQ ID NO: 25)) were added, and then deionized water was added to bring the total amount to 49.5 μl in the end. Thereafter, 0.5 μl of Phusion DNA Polymerase (FINNZYMES) was added thereto, and PCR was carried out. PCR was carried out for 30 cycles, with each cycle consisting of 98° C. for 10 seconds, 55° C. for 15 seconds, and 72° C. for 1 minute and 30 seconds. The resulting PCR product was designated as PCR product No. 8.

[0153] PCR products were each purified and dissolved in 15 μl of H₂O. DNAs of PCR product No. 7 and PCR product No. 8 were mixed in amounts of 1 μl each. The resultant was used as a template, 10 μl of 10× buffer and 4 μl of the 2 mM dNTP mixture attached to the Phusion High-Fidelity DNA Polymerase kit (FINNZYMES), and 1 μl each of 10 μM primers EcoT7-F (5′-CCGGAATTCTAATACGACTC-3′ (SEQ ID NO: 18)) and 5563-R (5′-CTGCAGCAAGCCTTGGATCT-3′ (SEQ ID NO: 20)) were added, and deionized water was added to bring the total amount to 49.5 μl in the end. Thereafter, 0.5 μl of Phusion DNA Polymerase (FINNZYMES) was added thereto, and PCR was carried out. PCR was carried out for 30 cycles, with each cycle consisting of 98° C. for 10 seconds, 55° C. for 15 seconds, and 72° C. for 2 minutes. The resulting PCR product was designated as PCR product No. 9. The PCR product was purified and then dissolved in 30 μl of H₂O.

[0154] pSGR-JFH-2.1 and the purified PCR product No. 9 were digested with restriction enzymes EcoR I and EcoT22 I. Each HCV cDNA fragment was fractionated by agarose gel electrophoresis and then purified. These two DNA fragments were mixed with Ligation Mix (Takara Bio Inc.), and the two DNA fragments were ligated to each other. The thus obtained recombinant expression vector having a nucleotide substitution causing an amino acid substitution T→N at position 1652 was designated as pSGR-JFH-2.1 T1652N.

[0155] pSGR-JFH-2.1 was used as a template, 10 μl of 10× buffer and 4 μl of 2 mM dNTP mixture attached to the Phusion High-Fidelity DNA Polymerase kit (FINNZYMES), and 1 μl each of 10 μM primers 5162-F (5′-TGGGACGCCATGTGGAAGTG-3′ (SEQ ID NO: 26)) and 2196AT-R (5′-TGATCCCCGTGTCAAGCGCCGCGCCGCAGT-3′ (SEQ ID NO: 27)) were added, and then deionized water was added to bring the total amount to 49.5 μl in the end. Thereafter, 0.5 μl of Phusion DNA Polymerase (FINNZYMES) was added thereto, and PCR was carried out. PCR was carried out for 30 cycles, with each cycle consisting of 98° C. for 10 seconds, 55° C. for 15 seconds, and 72° C. for 30 seconds. The resulting PCR product was designated as PCR product No. 10. Next, pSGR-JFH-2.1 was used as a template, 10 μl of 10× buffer and 4 μl of 2 mM dNTP mixture attached to the Phusion High-Fidelity DNA Polymerase kit (FINNZYMES), and 1 μl each of 10 μM primers 7827-R (5′-AAAGTTACCTTTTTAGCCCT-3′ (SEQ ID NO: 28)) and 2196AT-F (5′-CGCGGCGCTTGACACGGGGATCACCTCCAT-3′ (SEQ ID NO: 29)) were added, and then deionized water was added to bring the total amount to 49.5 μl in the end. Thereafter, 0.5 μl of Phusion DNA Polymerase (FINNZYMES) was added thereto, and PCR was carried out. PCR was carried out for 30 cycles, with each cycle consisting of 98° C. for 10 seconds, 55° C. for 15 seconds, and 72° C. for 1 minute and 30 seconds. The resulting PCR product was designated as PCR product No. 11.

[0156] PCR products were each purified and dissolved in 15 μl of H₂O. DNAs of PCR product No. 10 and PCR product No. 11 were mixed in amounts of 1 μl each. The resultant was used as a template, 10 μl of 10× buffer and 4 μl of the 2 mM dNTP mixture attached to the Phusion High-Fidelity DNA Polymerase kit (FINNZYMES), and 1 μl each of 10 μM primers 5162-F (5′-TGGGACGCCATGTGGAAGTG-3′ (SEQ ID NO: 26)) and 7827-R (5′-AAAGTTACCTTTTTAGCCCT-3′ (SEQ ID NO: 28)) were added, and deionized water was added to bring the total amount to 49.5 μl in the end. Thereafter, 0.5 μl of Phusion DNA Polymerase (FINNZYMES) was added thereto, and PCR was carried out. PCR was carried out for 30 cycles, with each cycle consisting of 98° C. for 10 seconds, 55° C. for 15 seconds, and 72° C. for 2 minutes. The resulting PCR product was designated as PCR product No. 12. The PCR product was purified and then dissolved in 30 μl of H₂O.

[0157] pSGR-JFH-2.1 and the purified PCR product No. 12 were digested with restriction enzymes EcoT22 I and Psi I. Each HCV cDNA fragment was fractionated by agarose gel electrophoresis and then purified. These two DNA fragments were mixed with Ligation Mix (Takara Bio Inc.), and the two DNA fragments were ligated to each other. The thus obtained recombinant expression vector having a nucleotide substitution causing an amino acid substitution A→T at position 2196 was designated as pSGR-JFH-2.1 A2196T.

[0158] pSGR-JFH-2.1 was used as a template, 10 μl of 10× buffer and 4 μl of 2 mM dNTP mixture attached to the Phusion High-Fidelity DNA Polymerase kit (FINNZYMES), and 1 μl each of 10 μM primers 5162-F (5′-TGGGACGCCATGTGGAAGTG-3′ (SEQ ID NO: 26)) and 2218AS-R (5′-GGTGCAGGTGGACCGCAGCGACGGTGCTGA-3′ (SEQ ID NO: 30)) were added, and then deionized water was added to bring the total amount to 49.5 μl in the end. Thereafter, 0.5 μl of Phusion DNA Polymerase (FINNZYMES) was added thereto, and PCR was carried out. PCR was carried out for 30 cycles, with each cycle consisting of 98° C. for 10 seconds, 55° C. for 15 seconds, and 72° C. for 30 seconds. The resulting PCR product was designated as PCR product No. 13. Next, pSGR-JFH-2.1 was used as a template, 10 μl of 10× buffer and 4 μl of 2 mM dNTP mixture attached to the Phusion High-Fidelity DNA Polymerase kit (FINNZYMES), and 1 μl each of 10 μM primers 7827-R (5′-AAAGTTACCTTTTTAGCCCT-3′ (SEQ ID NO: 28)) and 2218AS-F (5′-CCGTCGCTGCGGTCCACCTGCACCACCCAC-3′ (SEQ ID NO: 31)) were added, and then deionized water was added to bring the total amount to 49.5 μl in the end. Thereafter, 0.5 μl of Phusion DNA Polymerase (FINNZYMES) was added thereto, and PCR was carried out. PCR was carried out for 30 cycles, with each cycle consisting of 98° C. for 10 seconds, 55° C. for 15 seconds, and 72° C. for 1 minute and 30 seconds. The resulting PCR product was designated as PCR product No. 14.

[0159] PCR products were each purified and dissolved in 15 μl of H₂O. DNAs of PCR product No. 13 and PCR product No. 14 were mixed in amounts of 1 μl each. The resultant was used as a template, 10 μl of 10× buffer and 4 μl of the 2 mM dNTP mixture attached to the Phusion High-Fidelity DNA Polymerase kit (FINNZYMES), and 1 μl each of 10 μM primers 5162-F (5′-TGGGACGCCATGTGGAAGTG-3′ (SEQ ID NO: 26)) and 7827-R (5′-AAAGTTACCTTTTTAGCCCT-3′ (SEQ ID NO: 28)) were added, and deionized water was added to bring the total amount to 49.5 μl in the end. Thereafter, 0.5 μl of Phusion DNA Polymerase (FINNZYMES) was added thereto, and PCR was carried out. PCR was carried out for 30 cycles, with each cycle consisting of 98° C. for 10 seconds, 55° C. for 15 seconds, and 72° C. for 2 minutes. The resulting PCR product was designated as PCR product No. 15. The PCR product was purified and then dissolved in 30 μl of H₂O.

[0160] pSGR-JFH-2.1 and the purified PCR product No. 15 were digested with restriction enzymes EcoT22 I and Psi I. Each HCV cDNA fragment was fractionated by agarose gel electrophoresis and then purified. These two DNA fragments were mixed with Ligation Mix (Takara Bio Inc.), and the two DNA fragments were ligated to each other. The thus obtained recombinant expression vector having a nucleotide substitution causing an amino acid substitution A→S at position 2218 was designated as pSGR-JFH-2.1 A2218S.

[0161] pSGR-JFH-2.1 was used as a template, 10 μl of 10× buffer and 4 μl of 2 mM dNTP mixture attached to the Phusion High-Fidelity DNA Polymerase kit (FINNZYMES), and 1 μl each of 10 μM primers 5162-F (5′-TGGGACGCCATGTGGAAGTG-3′ (SEQ ID NO: 26)) and 2223HQ-R (5′-TAGGTGTTGCTTTGGGTGGTGCAGGTGGCC-3′ (SEQ ID NO: 32)) were added, and then deionized water was added to bring the total amount to 49.5 μl in the end. Thereafter, 0.5 μl of Phusion DNA Polymerase (FINNZYMES) was added thereto, and PCR was carried out. PCR was carried out for 30 cycles, with each cycle consisting of 98° C. for 10 seconds, 55° C. for 15 seconds, and 72° C. for 30 seconds. The resulting PCR product was designated as PCR product No. 16. Next, pSGR-JFH-2.1 was used as a template, 10 μl of 10× buffer and 4 μl of 2 mM dNTP mixture attached to the Phusion High-Fidelity DNA Polymerase kit (FINNZYMES), and 1 μl each of 10 μM primers 7827-R (5′-AAAGTTACCTTTTTAGCCCT-3′ (SEQ ID NO: 28)) and 2223HQ-F (5′-CTGCACCACCCAAAGCAACACCTATGACGT-3′ (SEQ ID NO: 33)) were added, and then deionized water was added to bring the total amount to 49.5 μl in the end. Thereafter, 0.5 μl of Phusion DNA Polymerase (FINNZYMES) was added thereto, and PCR was carried out. PCR was carried out for 30 cycles, with each cycle consisting of 98° C. for 10 seconds, 55° C. for 15 seconds, and 72° C. for 1 minute and 30 seconds. The resulting PCR product was designated as PCR product No. 17.

[0162] PCR products were each purified and dissolved in 15 μl of H₂O. DNAs of PCR product No. 16 and PCR product No. 17 were mixed in amounts of 1 μl each. The resultant was used as a template, 10 μl of 10× buffer and 4 μl of the 2 mM dNTP mixture attached to the Phusion High-Fidelity DNA Polymerase kit (FINNZYMES), and 1 μl each of 10 μM primers 5162-F (5′-TGGGACGCCATGTGGAAGTG-3′ (SEQ ID NO: 26)) and 7827-R (5′-AAAGTTACCTTTTTAGCCCT-3′ (SEQ ID NO: 28)) were added, and deionized water was added to bring the total amount to 49.5 μl in the end. Thereafter, 0.5 μl of Phusion DNA Polymerase (FINNZYMES) was added thereto, and PCR was carried out. PCR was carried out for 30 cycles, with each cycle consisting of 98° C. for 10 seconds, 55° C. for 15 seconds, and 72° C. for 2 minutes. The resulting PCR product was designated as PCR product No. 18. The PCR product was purified and then dissolved in 30 μl of H₂O.

[0163] pSGR-JFH-2.1 and the purified PCR product No. 18 were digested with restriction enzymes EcoT22 I and Psi I. Each HCV cDNA fragment was fractionated by agarose gel electrophoresis and then purified. These two DNA fragments were mixed with Ligation Mix (Takara Bio Inc.), and the two DNA fragments were ligated to each other. The thus obtained recombinant expression vector having a nucleotide substitution causing amino acid substitution H→K at position 2223 was designated as pSGR-JFH-2.1 H2223Q.

[0164] pSGR-JFH-2.1 was used as a template, 10 μl of 10× buffer and 4 μl of 2 mM dNTP mixture attached to the Phusion High-Fidelity DNA Polymerase kit (FINNZYMES), and 1 μl each of 10 μM primers 5162-F (5′-TGGGACGCCATGTGGAAGTG-3′ (SEQ ID NO: 26)) and 2281QR-R (5′-TGGGAATTGTTTCTCGGGG-3′ (SEQ ID NO: 35)) were added, and then deionized water was added to bring the total amount to 49.5 μl in the end. Thereafter, 0.5 μl of Phusion DNA Polymerase (FINNZYMES) was added thereto, and PCR was carried out. PCR was carried out for 30 cycles, with each cycle consisting of 98° C. for 10 seconds, 55° C. for 15 seconds, and 72° C. for 30 seconds. The resulting PCR product was designated as PCR product No. X. Next, pSGR-JFH-2.1 was used as a template, 10 μl of 10× buffer and 4 μl of 2 mM dNTP mixture attached to the Phusion High-Fidelity DNA Polymerase kit (FINNZYMES), and 1 μl each of 10 μM primers 7827-R (5′-AAAGTTACCTTTTTAGCCCT-3′ (SEQ ID NO: 28)) and 2281QR-F (5′-TACTTGATCCCCGAGAAAC-3′ (SEQ ID NO: 34)) were added, and then deionized water was added to bring the total amount to 49.5 μl in the end. Thereafter, 0.5 μl of Phusion DNA Polymerase (FINNZYMES) was added thereto, and PCR was carried out. PCR was carried out for 30 cycles, with each cycle consisting of 98° C. for 10 seconds, 55° C. for 15 seconds, and 72° C. for 1 minute and 30 seconds. The resulting PCR product was designated as PCR product No. Y.

[0165] PCR products were each purified and dissolved in 15 μl of H₂O. DNAs of PCR product No. X and PCR product No. Y were mixed in amounts of 1 μl each. The resultant was used as a template, 10 μl of 10× buffer and 4 μl of the 2 mM dNTP mixture attached to the Phusion High-Fidelity DNA Polymerase kit (FINNZYMES), and 1 μl each of 10 μM primers 5162-F (5′-TGGGACGCCATGTGGAAGTG-3′ (SEQ ID NO: 26)) and 7827-R (5′-AAAGTTACCTTTTTAGCCCT-3′ (SEQ ID NO: 28)) were added, and deionized water was added to bring the total amount to 49.5 μl in the end. Thereafter, 0.5 μl of Phusion DNA Polymerase (FINNZYMES) was added thereto, and PCR was carried out. PCR was carried out for 30 cycles, with each cycle consisting of 98° C. for 10 seconds, 55° C. for 15 seconds, and 72° C. for 2 minutes. The resulting PCR product was designated as PCR product No. Z. The PCR product was purified and then dissolved in 30 μl of H₂O.

[0166] pSGR-JFH-2.1 and the purified PCR product No. Z were digested with restriction enzymes EcoT22 I and Psi I. Each HCV cDNA fragment was fractionated by agarose gel electrophoresis and then purified. These two DNA fragments were mixed with Ligation Mix (Takara Bio Inc.), and the two DNA fragments were ligated to each other. The thus obtained recombinant expression vector having a nucleotide substitution causing amino acid substitution Q→R at position 2281 was designated as pSGR-JFH-2.1 Q2281R.

[0167] These plasmids were cleaved with Xba I and then subjected to phenol chloroform extraction and ethanol precipitation. Each HCV RNA was synthesized using the thus cleaved plasmids as templates and a MEGAscript T7 kit (Ambion).

[0168] The mutant JFH-2.1-derived subgenomic replicon RNA (3 μg) obtained as described above was introduced into Huh7 cells by electroporation. The electroporated Huh7 cells were seeded on a culture dish and cultured for 16 to 24 hours, and then G418 (neomycin) was added to the culture dish. Then, the culture was continued while replacing the culture medium twice a week. After 21 days of culture following seeding, viable cells were stained with crystal violet (FIG. 4B). As a result, whereas no colony formation could be observed in cells into which the JFH-2.1-derived subgenomic replicon RNA without mutation (FIG. 4B, top) had been introduced, colony formation was clearly observed in cells into which the mutation-introduced subgenomic replicon RNA had been introduced. In particular, the subgenomic replicon RNA with A→S mutation at position 2218 exerted significantly increased colony forming capacity, indicating the acquisition of high replicon replication capacity. Therefore, it was demonstrated that these amino acid mutations found as described above in the HCV precursor proteins, in particular A→S amino acid mutation at position 2218 (hereinafter also referred to as A(2218)S), enhance replication of HCV subgenomic replicon RNA.

### Example 6

### Construction of Expression Vectors pJ6/JFH-2.1 and pJ6/JFH-2.1 A2218S

[0169] In order to evaluate whether or not HCV particles could be produced in cultured cells by using a replicon RNA based on the JFH-2.1 strain-derived mutant HCV genome sequence as obtained in the above Examples, plasmid vectors expressing the replicon RNA having the full-length HCV genome sequence (HCV full-genomic replicon RNA) were constructed.

[0170] Specifically, with reference to the report that a J6/JFH-1 chimeric HCV genome is capable of efficiently producing HCV particles (Lindenbach et al., Science (2005) 309, p 623-626), using another HCV strain, a JFH-1 strain (genotype 2a)-derived 5′ UTR sequence (SEQ ID NO: 8), the sequence of a J6CF strain (genotype 2a)-derived structural region (containing sequences of Core, E1, E2, and p7 regions; SEQ ID NO: 7), a JFH-1 strain-derived NS2 region (SEQ ID NO: 9), and a JFH-2.1 strain-derived sequence ranging from the NS3 region to 3′ UTR (containing NS3, NS4A, NS4B, NS5A, and NS5B regions and 3′ UTR; SEQ ID NO: 10) were ligated in this order to form the chimeric HCV genome sequence J6/JFH-2.1 (SEQ ID NO: 11) (FIG. 5B). Then the chimeric HCV genome sequence J6/JFH-2.1 was incorporated under control of a T7 promoter in plasmid pUC19, thereby constructing a recombinant expression vector pJ6/JFH-2.1, as described below. A vector pJ6/JFH-2.1 A2217S expressing the mutant replicon J6/JFH-2.1 A2217S (FIG. 5B) prepared by introducing A(2218)S mutation within the NS5A region demonstrated in Example 5 to increase the efficiency of replicon replication into J6/JFH-2.1. The nucleotide sequence of J6/JFH-2.1 A2217S is shown in SEQ ID NO: 12. In the sequence of SEQ ID NO: 12, G at nucleotide position 6836 of J6/JFH-2.1 (SEQ ID NO: 11) was changed to T, so that amino acid mutation from A to S at position 2217 was introduced. Construction was carried out by procedures according to the previous report (Wakita, T et al., Nat. Med., 11: 791-796, 2005). The amino acid sequence of the precursor protein encoded by the full-length genome sequence of J6/JFH-2.1 A2217S is shown in SEQ ID NO: 88. The amino acid at position 2218 in the JFH-2.1 full-length amino acid sequence shown in SEQ ID NO: 5 is alanine (A), and the alanine located at this position is aligned with the alanine at position 2217 in the full-length amino acid sequence of chimeric HCV, J6/JFH2.1. That is, in the protein encoded by the full-length genome nucleotide sequence of J6/JFH-2.1 A2217S (SEQ ID NO: 12), alanine at position 2217 is substituted with serine (S). In this case, this substitution also corresponds to amino acid substitution A(2218)S as defined using the amino acid sequence shown in SEQ ID NO: 6 as a reference sequence. The name of the mutant replicon has been changed from the previous name, J6/JFH-2.1 A2218S to J6/JFH-2.1 A2117S just for reasons of expediency, and thus they refer to the same replicon. The name of the expression vector encoding the mutant replicon was also changed to pJ6/JFH-2.1 A2117S similarly.

[0171] Specifically, pJ6/JFH-2.1 was used as a template, 10 μl of 10× buffer and 4 μl of 2 mM dNTP mixture attached to the Phusion High-Fidelity DNA Polymerase kit (FINNZYMES), and 1 μl each of 10 μM primers 5162-F (5′-TGGGACGCCATGTGGAAGTG-3′ (SEQ ID NO: 26)) and 2218AS-R (5′-GGTGCAGGTGGACCGCAGCGACGGTGCTGA-3′ (SEQ ID NO: 30)) were added, and then deionized water was added to bring the total amount to 49.5 μl in the end. Thereafter, 0.5 μl of Phusion DNA Polymerase (FINNZYMES) was added thereto, and PCR was carried out. PCR was carried out for 30 cycles, with each cycle consisting of 98° C. for 10 seconds, 55° C. for 15 seconds, and 72° C. for 30 seconds. The resulting PCR product was designated as PCR product No. 19. Next, pJ6/JFH-2.1 was used as a template, 10 μl of 10× buffer and 4 μl of 2 mM dNTP mixture attached to the Phusion High-Fidelity DNA Polymerase kit (FINNZYMES), and 1 μl each of 10 μM primers 7827-R (5′-AAAGTTACCTTTTTAGCCCT-3′ (SEQ ID NO: 28)) and 2218AS-F (5′-CCGTCGCTGCGGTCCACCTGCACCACCCAC-3′ (SEQ ID NO: 31)) were added, and then deionized water was added to bring the total amount to 49.5 μl in the end. Thereafter, 0.5 μl of Phusion DNA Polymerase (FINNZYMES) was added thereto, and PCR was carried out. PCR was carried out for 30 cycles, with each cycle consisting of 98° C. for 10 seconds, 55° C. for 15 seconds, and 72° C. for 1 minute and 30 seconds. The resulting PCR product was designated as PCR product No. 20.

[0172] These PCR products were each purified and dissolved in 15 μl of H₂O. DNAs of PCR product No. 19 and PCR product No. 20 were mixed in amounts of 1 μl each. The resultant was used as a template, 10 μl of 10× buffer and 4 μl of the 2 mM dNTP mixture attached to the Phusion High-Fidelity DNA Polymerase kit (FINNZYMES), and 1 μl each of 10 μM primers 5162-F (5′-TGGGACGCCATGTGGAAGTG-3′ (SEQ ID NO: 26)) and 7827-R (5′-AAAGTTACCTTTTTAGCCCT-3′ (SEQ ID NO: 28)) were added, and deionized water was added to bring the total amount to 49.5 μl in the end. Thereafter, 0.5 μl of Phusion DNA Polymerase (FINNZYMES) was added thereto, and PCR was carried out. PCR was carried out for 30 cycles, with each cycle consisting of 98° C. for 10 seconds, 55° C. for 15 seconds, and 72° C. for 2 minutes. The resulting PCR product was designated as PCR product No. 21. The PCR product was purified and then dissolved in 30 μl of H₂O.

[0173] pJ6/JFH-2.1 and the purified PCR product No. 21 were digested with restriction enzymes EcoT22 I and Psi I. Each HCV cDNA fragment was fractionated by agarose gel electrophoresis and then purified. These two DNA fragments were mixed with Ligation Mix (Takara Bio Inc.), and the two DNA fragments were ligated to each other. The thus obtained recombinant expression vector having a nucleotide substitution causing amino acid substitution A→S at position 2218 was designated as pJ6/JFH-2.1 A2217S.

### Example 7

### Evaluation of HCV Replicon Replication Capacity in Cells into which J6/JFH-2.1 and J6/JFH-2.1 A2217S RNA has been Introduced

[0174] HCV replicon RNA (chimeric HCV full-genomic replicon RNA) was prepared by procedures similar to those in Example 2 using the expression vectors pJ6/JFH-2.1 and pJ6/JFH-2.1 A2217S constructed in Example 6. The thus obtained HCV replicon RNAs, J6/JFH-2.1 HCV RNA and J6/JFH-2.1 A2217S HCV RNA were each introduced into Huh7 cells by electroporation. After introduction, cells were collected at 4, 12, 24, 48, 72, and 96 hours after electroporation and then HCV Core protein contained in the cells was quantified using an HCV antigen ELISA test kit (Ortho Clinical Diagnostics), and thereby HCV replicon replication capacity in cells was evaluated (FIG. 6).

[0175] As a result, the amount of Core protein in cells into which J6/JFH-2.1 A2217S HCV RNA had been introduced was found to increase at 48 hours after introduction and thereafter, indicating efficient replication of the HCV replicon in the cells. In contrast, the amount of Core protein in cells into which J6/JFH-2.1 HCV RNA had been introduced was not found to have increased even at 96 hours after introduction. The above results demonstrated that A→S mutation at position 2218 in the NS5A region was also important for efficient replication of the chimeric HCV replicon RNA in cells. Herein, “position 2218” means a mutation position as defined using the amino acid sequence shown in SEQ ID NO: 6 as a reference sequence, and the corresponding mutation in the full-length amino acid sequence of the mutated chimeric HCV is A→S mutation at position 2217.

### Example 8

### Evaluation of HCV Particle-Producing Capacity in Cells into which J6/JFH-2.1 A2217S HCV RNA has been Introduced

[0176] While subculturing Huh7 cells into which J6/JFH-2.1 A2217S HCV RNA had been introduced in a manner similar to that in Example 7 in a culture medium (Dulbecco's modified Eagle medium (DMEM)-10% fetal bovine serum), HCV Core protein contained in a culture supernatant was quantified over time using an HCV antigen ELISA test kit (Ortho Clinical Diagnostics) to confirm the production of HCV particles (FIG. 7).

[0177] As a result, whereas almost no Core protein was confirmed in the culture supernatant for 60 days after HCV replicon RNA introduction, the amount of Core protein was found to increase at 60 days to 80 days after introduction. After 80 days, Core protein was detected at an almost constant level. These results demonstrated that J6/JFH-2.1 A2217S HCV RNA enabled production of viral particles capable of being released extracellularly, when cells were subcultured after introduction of the RNA thereinto.

### Example 9

### Evaluation of Infectivity of J6/JFH-2.1 A2217S HCV Particles

[0178] Whether or not the J6/JFH-2.1 A2217S HCV RNA-derived HCV particles (hereinafter, J6/JFH-2.1 A2217S HCV particles), the production of which was confirmed in Example 8, had infectivity was examined. First, J6/JFH-2.1 A2217S HCV RNA was introduced into Huh7 cells by electroporation, similarly to the above Example, and then subculture was carried out. The culture supernatant on day 88 after introduction into cells was added to naive Huh7 cells. After 72 hours, the number of HCV-infected cells was determined by a focus-forming assay, and the infectious titer was calculated (FIG. 8).

[0179] As a result, the infectious titer was found to be 5.21×10³ ffu/ml. The value was divided by the amount of HCV Core (3.96×10³ fmol/L) in the culture supernatant. Thus, the infectious titer per unit HCV protein was calculated to be 1.32 (infectious titer/Core value).

[0180] The result demonstrated that HCV particles produced via introduction of J6/JFH-2.1 A2217S HCV RNA into cells had infectivity.

### Example 10

### Construction of JFH-2.1 and JFH-2.1 A2218S HCV Full-Genomic Replicon RNA Expression Vectors

[0181] A plasmid vector pJFH-2.1 expressing replicon RNA having the full-length genome sequence (HCV full-genomic replicon RNA (FIG. 9A)) of the JFH-2.1 strain that comprises the 5′ UTR region, structural region (Core, E1, E2, and p7 regions), nonstructural region (NS2, NS3, NS4A, NS4B, NS5A, and NS5B regions), and the 3′ UTR region, was constructed in order to evaluate whether or not HCV particles could be produced in cultured cells using the HCV genome RNA of the JFH-2.1 strain based on the results of Examples 6-9 demonstrating that a chimeric HCV full-genomic replicon, J6/JFH-2.1 A2217S HCV RNA, made it possible to produce infectious HCV particles.

[0182] Also, A→S mutation at position 2218 in the NS5A region demonstrated in Examples 7-9 to be important for intracellular replication of J6/JFH-2.1 A2217S chimeric HCV replicon RNA or production of infectious HCV particles therefrom was introduced into the JFH-2.1 genome sequence in a manner similar to that in Example 6. A vector pJFH-2.1 A2218S expressing the mutant full genomic replicon JFH-2.1 A2218S (FIG. 9B) was constructed. The construction was carried out by procedures according to the previous report (Wakita, T et al., Nat Med., (2005)). The nucleotide sequence of JFH-2.1 A2218S is shown in SEQ ID NO: 13. In the sequence of SEQ ID NO: 13, A2218S amino acid mutation had been introduced by alternation of G to T at nucleotide position 6992 of JFH-2.1 (SEQ ID NO: 3).

### Example 11

### Evaluation of HCV Particle-Producing Capacity in Cells into which JFH-2.1 A2218S HCV RNA has been Introduced

[0183] HCV replicon RNA (mutant HCV full-genomic replicon RNA) was prepared by techniques similar to those in Example 2 using the expression vector pJFH-2.1 A2218S constructed in Example 10. The thus obtained HCV replicon RNA, JFH-2.1 A2218S HCV RNA, was introduced into Huh7 cells by electroporation. Thereafter, while subculturing cells in a culture medium (10% fetal calf serum-containing Dulbecco's modified Eagle's medium (DMEM)), HCV Core protein contained in the culture supernatant was quantified over time using an HCV antigen ELISA test kit (Ortho Clinical Diagnostics) to confirm the production of HCV particles (FIG. 10).

[0184] As a result, almost no Core protein was confirmed in the culture supernatant for 40 days after introduction of HCV replicon RNA. However, the amount of Core protein was found to increase after 40 to 60 days after introduction. On and after 60 days, Core protein was detected at an almost constant level. These results demonstrated that JFH-2.1 A2218S HCV RNA enabled production of viral particles capable of being released extracellularly, when cells were subcultured after introduction of the RNA into the cells.

### Example 12

### Evaluation of Infectivity of JFH-2.1 A2218S HCV Particles

[0185] Whether or not the JFH-2.1 A2218S HCV RNA-derived HCV particles (hereinafter, JFH-2.1 A2218S HCV particles), the production of which was confirmed in Example 11, had infectivity was examined. First, similarly to the above Example, JFH-2.1 A2218S HCV RNA was introduced into Huh7 cells by electroporation, and then subculture was carried out. The culture supernatant on day 63 after introduction into cells was added to naive Huh7 cells. After 72 hours, the number of HCV-infected cells was determined by a focus-forming method, and the infectious titer was calculated (FIG. 11).

[0186] As a result, the infectious titer was 4.32×10⁴ ffu/ml. The value was divided by the amount of HCV Core (1.17×10⁴ fmol/L) in the culture supernatant. Thus, the infectious titer per unit HCV protein was calculated to be 3.69 (infectious titer/Core value). The result demonstrated that HCV particles produced by introduction of JFH-2.1 A2218S HCV RNA into cells had infectivity and the infectious titer per unit protein was found to be higher than that of J6/JFH-2.1 A2217S HCV particles.

### Example 13

### Mutation Analysis for Nucleotide Sequence Resulting from Subculture of J6/JFH-2.1 A2217S RNA-Replicating Cells

[0187] Fresh uninfected Huh-7 cells were infected with the culture supernatant of Huh-7 cells (Huh-7 cells into which J6/JFH-2.1 A2217S HCV RNA had been introduced) that contains J6/JFH-2.1 A2217S HCV particles with high infectious titer obtained in Example 8, at moi (multiplicity of infection) of 0.03. The infected cells were subcultured until the amount of Core protein and the infectious titer in the culture supernatant reached 1,000 fmol/L and 1,000 ffu/ml or more, respectively. Infection with the culture supernatant containing the virus and subculture of infected cells were repeated 3 to 4 times and then sequence analysis was conducted for HCV RNA contained in the culture supernatant. Two infection lines were employed and designated as 4A and 4B, respectively. First, RNA was extracted from each culture supernatant of Huh-7 cells containing J6/JFH-2.1 A2217S HCV particles of the infection lines 4A and 4B and then HCV RNA contained therein was amplified by RT-PCR. Random primers (6 mer, Takara Bio Inc.) were used for the amplification. Amplification products were cloned into sequencing cloning vectors and then subjected to sequence analysis by a conventional method.

[0188] As a result, in the case of infection line 4A, nucleotide substitutions causing amino acid substitutions at 7 positions: 2 positions (M→K at position 405 and N→T at position 417) in the E2 region that is in the structural region; and 1 position (M→T at position 868) in the NS2 region, 1 position (T→A at position 1642) in the NS3 region, 1 position (I→V at position 1722) in the NS4B region, 1 position (S→G at position 2204) in the NS5A region, and 1 position (T→I at position 2695) in the NS5B region that are in the nonstructural region were found. Also, in the case of infection line 4B, nucleotide substitutions causing amino acid substitutions at 8 positions: 1 position (A→T at position 148) in Core region, 1 position (M→V at position 356) in the E1 region, and 1 position (V→G at position 626) in the E2 region that are in the structural region; and 1 position (I→V at position 1687) in the NS4A region, 1 position (K→R at position 1767) in the NS4B region, 1 position (C→S at position 2219) in the NS5A region, and 2 positions (T→I at position 2695 and L→P at position 3016) in the NS5B region that are in the nonstructural region were found. In addition, the positions of amino acid mutations shown in this Example and the following Examples indicate the positions in the relevant mutant amino acid sequence.

### Example 14

### Construction of J6/JFH-2.1 A2217S-Derived Mutant HCV Full Genome RNA Expression Vector

[0189] Plasmids were prepared by introducing various combinations of the mutations obtained in Example 13 into the plasmid pJ6/JFH-2.1 A2217S in order to confirm whether or not the mutations found in Example 13 were adaptive mutations. Specifically, pJ6/JFH-2.1 A2217S was used as a template, 10 μl of 10× buffer and 4 μl of 2 mM dNTP mixture attached to the Phusion High-Fidelity DNA Polymerase kit (FINNZYMES), and 1 μl each of 10 μM primers 2219CS-S (5′-GCGTTCCACCAGTGCCACCCACGGCACGGC-3′ (SEQ ID NO: 36)) and 8035R-2a (5′-CCACACGGACTTGATGTGGT-3′ (SEQ ID NO: 37)) were added, and then deionized water was added to bring the total amount to 49.5 μl in the end. Thereafter, 0.5 μl of Phusion DNA Polymerase (FINNZYMES) was added thereto, and PCR was carried out. PCR was carried out for 30 cycles, with each cycle consisting of 98° C. for 10 seconds, 55° C. for 15 seconds, and 72° C. for 30 seconds. The resulting PCR product was designated as PCR product No. 22. Next, pJ6/JFH-2.1 was used as a template, 10 μl of 10× buffer and 4 μl of 2 mM dNTP mixture attached to the Phusion High-Fidelity DNA Polymerase kit (FINNZYMES), and 1 μl each of 10 μM primers 6586S-IH (5′-CAAGACCGCCATCTGGAGGGTGGCGGCCTC-3′ (SEQ ID NO: 38)) and 2219CS-R (5′-GGTGGCACTGGTGGAACGCAGCGACGGGGC-3′ (SEQ ID NO: 39)) were added, and then deionized water was added to bring the total amount to 49.5 μl in the end. Thereafter, 0.5 μl of Phusion DNA Polymerase (FINNZYMES) was added thereto, and PCR was carried out. PCR was carried out for 25 cycles, with each cycle consisting of 98° C. for 10 seconds, 55° C. for 15 seconds, and 72° C. for 1 minute and 30 seconds. The resulting PCR product was designated as PCR product No. 23.

[0190] PCR products were each purified and dissolved in 15 μl of H₂O. DNAs of PCR product No. 22 and PCR product No. 23 were mixed in amounts of 1 μl each. The resultant was used as a template, 10 μl of 10× buffer and 4 μl of the 2 mM dNTP mixture attached to the Phusion High-Fidelity DNA Polymerase kit (FINNZYMES), and 1 μl each of 10 μM primers 6586S-IH (5′-CAAGACCGCCATCTGGAGGGTGGCGGCCTC-3′ (SEQ ID NO: 38)) and 8035R-2a (5′-CCACACGGACTTGATGTGGT-3′ (SEQ ID NO: 37)) were added, and deionized water was added to bring the total amount to 49.5 μl in the end. Thereafter, 0.5 μl of Phusion DNA Polymerase (FINNZYMES) was added thereto, and PCR was carried out. PCR was carried out for 25 cycles, with each cycle consisting of 98° C. for 10 seconds, 55° C. for 15 seconds, and 72° C. for 2 minutes. The resulting PCR product was designated as PCR product No. 24. The PCR product was purified and then dissolved in 30 μl of H₂O.

[0191] pJ6/JFH-2.1 A2217S and the purified PCR product No. 24 were digested with restriction enzymes Blp I and Psi I. Each HCV cDNA fragment was fractionated by agarose gel electrophoresis and then purified. These two DNA fragments were mixed with Ligation Mix (Takara Bio Inc.), and the two DNA fragments were ligated to each other. The thus obtained recombinant expression vector having nucleotide substitutions causing amino acid substitutions A→S at position 2217 (corresponding to amino acid substitution A→S at position 2218 as defined using the amino acid sequence of SEQ ID NO: 6 as a reference sequence) and C→S at position 2219 was designated as pJ6/JFH-2.1 A2217S(CS). The nucleotide sequence of mutant HCV full-genomic sequence J6/JFH-2.1 A2217S (CS) cloned into pJ6/JFH-2.1 A2217S(CS) is shown in SEQ ID NO: 78 and the amino acid sequence of an HCV virus precursor protein encoded by the nucleotide sequence is shown in SEQ ID NO: 89.

[0192] Next, pJ6/JFH-2.1 A2217S was used as a template, 10 μl of 10× buffer and 4 μl of 2 mM dNTP mixture attached to the Phusion High-Fidelity DNA Polymerase kit (FINNZYMES), and 1 μl each of 10 μM primers 9124S-IH (5′-TTCAGCCCTCAGAAAACTTGGGGCGCCACC-3′ (SEQ ID NO: 40)) and 3016LR-R (5′-GGAGTAGGCTAgGGAGTAACAAGCGGGGTC-3′ (SEQ ID NO: 41)) were added, and then deionized water was added to bring the total amount to 49.5 μl in the end. Thereafter, 0.5 μl of Phusion DNA Polymerase (FINNZYMES) was added thereto, and PCR was carried out. PCR was carried out for 25 cycles, with each cycle consisting of 98° C. for 10 seconds, 55° C. for 15 seconds, and 72° C. for 30 seconds. The resulting PCR product was designated as PCR product No. 25. Next, pJ6/JFH-2.1 was used as a template, 10 μl of 10× buffer and 4 μl of 2 mM dNTP mixture attached to the Phusion High-Fidelity DNA Polymerase kit (FINNZYMES), and 1 μl each of 10 μM primers 3016LP-S (5′-TTGTTACTCCCTAGCCTACTCCTACTCTTT-3′ (SEQ ID NO: 42)) and M13R (5′-AACAGCTATGACCATG-3′ (SEQ ID NO: 43)) were added, and then deionized water was added to bring the total amount to 49.5 μl in the end. Thereafter, 0.5 μl of Phusion DNA Polymerase (FINNZYMES) was added thereto, and PCR was carried out. PCR was carried out for 25 cycles, with each cycle consisting of 98° C. for 10 seconds, 55° C. for 15 seconds, and 72° C. for 1 minute and 30 seconds. The resulting PCR product was designated as PCR product No. 26.

[0193] PCR products were each purified and dissolved in 15 μl of H₂O. DNAs of PCR product No. 25 and PCR product No. 26 were mixed in amounts of 1 μl each. The resultant was used as a template, 10 μl of 10× buffer and 4 μl of the 2 mM dNTP mixture attached to the Phusion High-Fidelity DNA Polymerase kit (FINNZYMES), and 1 μl each of 10 μM primers 9124S-IH (5′-TTCAGCCCTCAGAAAACTTGGGGCGCCACC-3′ (SEQ ID NO: 40)) and M13R (5′-AACAGCTATGACCATG-3′ (SEQ ID NO: 43)) were added, and deionized water was added to bring the total amount to 49.5 μl in the end. Thereafter, 0.5 μl of Phusion DNA Polymerase (FINNZYMES) was added thereto, and PCR was carried out. PCR was carried out for 25 cycles, with each cycle consisting of 98° C. for 10 seconds, 55° C. for 15 seconds, and 72° C. for 2 minutes. The resulting PCR product was designated as PCR product No. 27. The PCR product was purified and then dissolved in 30 μl of H₂O.

[0194] pJ6/JFH-2.1 A22175 and the purified PCR product No. 27 were digested with restriction enzymes EcoR V and Xba I. Each HCV cDNA fragment was fractionated by agarose gel electrophoresis and then purified. These two DNA fragments were mixed with Ligation Mix (Takara Bio Inc.), and the two DNA fragments were ligated to each other. The thus obtained recombinant expression vector having nucleotide substitutions causing amino acid substitutions A→S at position 2217 (corresponding to amino acid substitution A→S at position 2218 as defined using the amino acid sequence of SEQ ID NO: 6 as a reference sequence) and L→P at position 3016 was designated as pJ6/JFH-2.1 A2217S (LP). The nucleotide sequence of mutant HCV full-genomic sequence J6/JFH-2.1 A2217S (LP) cloned into pJ6/JFH-2.1 A2217S (LP) is shown in SEQ ID NO: 79 and the amino acid sequence of an HCV virus precursor protein encoded by the nucleotide sequence is shown in SEQ ID NO: 90.

[0195] Next, cDNA prepared by reverse transcription from the HCV RNA of the infection line 4B obtained in Example 13 was used as a template, 10 μl of 10× buffer and 4 μl of 2 mM dNTP mixture attached to the Phusion High-Fidelity DNA Polymerase kit (FINNZYMES), and 1 μl each of 10 μM primers 7993S-IH (5′-CAGCTTGTCCGGGAGGGC-3′ (SEQ ID NO: 44)) and 8892R-2a (5′-AGCCATGAATTGATAGGGGA-3′ (SEQ ID NO: 45)) were added, and then deionized water was added to bring the total amount to 49.5 μl in the end. Thereafter, 0.5 μl of Phusion DNA Polymerase (FINNZYMES) was added thereto, and PCR was carried out. PCR was carried out for 30 cycles, with each cycle consisting of 98° C. for 10 seconds, 55° C. for 15 seconds, and 72° C. for 30 seconds. The resulting PCR product was designated as PCR product No. 28.

[0196] pJ6/JFH-2.1 A2217S and the purified PCR product No. 28 were digested with restriction enzymes Bsu36 I and Srf I. Each HCV cDNA fragment was fractionated by agarose gel electrophoresis and then purified. These two DNA fragments were mixed with Ligation Mix (Takara Bio Inc.), and the two DNA fragments were ligated to each other. The thus obtained recombinant expression vector having nucleotide substitutions causing amino acid substitutions A→S at position 2217 (corresponding to amino acid substitution A→S at position 2218 as defined using the amino acid sequence of SEQ ID NO: 6 was used as a reference sequence) and T→I at position 2695 was designated as pJ6/JFH-2.1 A2217S (TI). The nucleotide sequence of mutant HCV full-genomic sequence J6/JFH-2.1 A2217S (TI) cloned into pJ6/JFH-2.1 A2217S (TI) is shown in SEQ ID NO: 80 and the amino acid sequence of an HCV virus precursor protein encoded by the nucleotide sequence is shown in SEQ ID NO: 91.

[0197] Next, pJ6/JFH-2.1 A2217S was used as a template, 10 μl of 10× buffer and 4 μl of 2 mM dNTP mixture attached to the Phusion High-Fidelity DNA Polymerase kit (FINNZYMES), and 1 μl each of 10 μM primers 450S-IH (5′-TGCCGCGCAGGGGCCCCAGGTTGGGTGTGC-3′ (SEQ ID NO: 46)) and 148AT-S (5′-GAGAGCTCTGGtGACGCCGCCGAGCGGGGC-3′ (SEQ ID NO: 47)) were added, and then deionized water was added to bring the total amount to 49.5 μl in the end. Thereafter, 0.5 μl of Phusion DNA Polymerase (FINNZYMES) was added thereto, and PCR was carried out. PCR was carried out for 25 cycles, with each cycle consisting of 98° C. for 10 seconds, 55° C. for 15 seconds, and 72° C. for 30 seconds. The resulting PCR product was designated as PCR product No. 29. Next, pJ6/JFH-2.1 was used as a template, 10 μl of 10× buffer and 4 μl of 2 mM dNTP mixture attached to the Phusion High-Fidelity DNA Polymerase kit (FINNZYMES), and 1 μl each of 10 μM primers 148AT-R (5′-GGCGGCGTCaCCAGAGCTCTCGCGCATGGC-3′ (SEQ ID NO: 48)) and 1440R-IH (5′-GCTCCCTGCATAGAGAAGTA-3′ (SEQ ID NO: 49)) were added, and then deionized water was added to bring the total amount to 49.5 μl in the end. Thereafter, 0.5 μl of Phusion DNA Polymerase (FINNZYMES) was added thereto, and PCR was carried out. PCR was carried out for 30 cycles, with each cycle consisting of 98° C. for 10 seconds, 55° C. for 15 seconds, and 72° C. for 1 minute and 30 seconds. The resulting PCR product was designated as PCR product No. 30.

[0198] PCR products were each purified and dissolved in 15 μl of H₂O. DNAs of PCR product No. 29 and PCR product No. 30 were mixed in amounts of 1 μl each. The resultant was used as a template, 10 μl of 10× buffer and 4 μl of the 2 mM dNTP mixture attached to the Phusion High-Fidelity DNA Polymerase kit (FINNZYMES), and 1 μl each of 10 μM primers 450S-IH (5′-TGCCGCGCAGGGGCCCCAGGTTGGGTGTGC-3′ (SEQ ID NO: 46)) and 1440R-IH (5′-GCTCCCTGCATAGAGAAGTA-3′ (SEQ ID NO: 49)) were added, and deionized water was added to bring the total amount to 49.5 μl in the end. Thereafter, 0.5 μl of Phusion DNA Polymerase (FINNZYMES) was added thereto, and PCR was carried out. PCR was carried out for 25 cycles, with each cycle consisting of 98° C. for 10 seconds, 55° C. for 15 seconds, and 72° C. for 2 minutes. The resulting PCR product was designated as PCR product No. 31. The PCR product was purified and then dissolved in 30 μl of H₂O.

[0199] pJ6/JFH-2.1 A2217S and the purified PCR product No. 31 were digested with restriction enzymes Cla I and Bsiw I. Each HCV cDNA fragment was fractionated by agarose gel electrophoresis and then purified. These two DNA fragments were mixed with Ligation Mix (Takara Bio Inc.), and the two DNA fragments were ligated to each other. The thus obtained recombinant expression vector having nucleotide substitutions causing amino acid substitutions A→S at position 2217 (corresponding to amino acid substitution A→S at position 2218 as defined using the amino acid sequence of SEQ ID NO: 6 as a reference sequence) and A→T at position 148 was designated as pJ6/JFH-2.1 A2217S) (AT).

[0200] Similarly, recombinant expression vectors, pJ6/JFH-2.1 A2217S(CS/LP), pJ6/JFH-2.1 A2217S(CS/TI), pJ6/JFH-2.1 A2217S (TI/LP), pJ6/JFH-2.1 A2217S (CS/TI/LP), and pJ6/JFH-2.1 A2217S (AT/CS/TI/LP) were constructed. In addition, these vectors were constructed by introducing the above-indicated amino acid mutations in various combinations into the full-length amino acid sequence of J6/JFH-2.1 A2217S. The nucleotide sequences of the mutant HCV full-genomic sequences, J6/JFH-2.1 A2217S(CS/LP), J6/JFH-2.1 A2217S(CS/TI), J6/JFH-2.1 A2217S (TI/LP), J6/JFH-2.1 A2217S(CS/TI/LP), and J6/JFH-2.1 A2217S (AT/CS/TI/LP) cloned into the pJ6/JFH-2.1 A2217S(CS/LP), pJ6/JFH-2.1 A2217S (CS/TI), pJ6/JFH-2.1 A2217S (TI/LP), pJ6/JFH-2.1 A2217S (CS/TI/LP), and pJ6/JFH-2.1 A2217S (AT/CS/TI/LP) vectors are shown in SEQ ID NOS: 81, 82, 83, 84, and 85, respectively. The amino acid sequences of HCV virus precursor proteins encoded by the nucleotide sequences are shown in SEQ ID NO: 92, 93, 94, 95, and 96, respectively.

[0201] A virus replicon into which all mutations of infection line 4A had been introduced was prepared as follows. First, cDNA prepared by reverse transcription from the HCV RNA of infection line 4A obtained in Example 13 was used as a template, 10 μl of 10× buffer and 4 μl of 2 mM dNTP mixture attached to the Phusion High-Fidelity DNA Polymerase kit (FINNZYMES), and 1 μl each of 10 μM primers 2099S-2a (5′-ACGGACTGTTTTAGGAAGCA-3′ (SEQ ID NO: 50)) and 3509R-2a (5′-TCTTGTCGCGCCCCGTCA-3′ (SEQ ID NO: 51)) were added, and then deionized water was added to bring the total amount to 49.5 μl in the end. Thereafter, 0.5 μl of Phusion DNA Polymerase (FINNZYMES) was added thereto, and PCR was carried out. PCR was carried out for 35 cycles, with each cycle consisting of 98° C. for 10 seconds, 55° C. for 15 seconds, and 72° C. for 20 seconds. The resulting PCR product was used as a template, 10 μl of 10× buffer and 4 μl of 2 mM dNTP mixture attached to the Phusion High-Fidelity DNA Polymerase kit (FINNZYMES), and 1 μl each of 10 μM primers 2285S-2a (5′-AATTTCACTCGTGGGGATCG-3′ (SEQ ID NO: 52)) and 3280R-IH (5′-TGACCTTCTTCTCCATCGGACTG-3′ (SEQ ID NO: 53)) were added, and then deionized water was added to bring the total amount to 49.5 μl in the end. Thereafter, 0.5 μl of Phusion DNA Polymerase (FINNZYMES) was added thereto, and PCR was carried out. PCR was carried out for 30 cycles, with each cycle consisting of 98° C. for 10 seconds, 55° C. for 15 seconds, and 72° C. for 20 seconds. The resulting PCR product was designated as PCR product No. 32. pJ6/JFH-2.1 A2217S (TI) and the purified PCR product No. 32 were digested with restriction enzymes Kpn I and Af III. Each HCV cDNA fragment was fractionated by agarose gel electrophoresis and then purified. These two DNA fragments were mixed with Ligation Mix (Takara Bio Inc.), and the two DNA fragments were ligated to each other. The thus obtained recombinant expression vector having nucleotide substitutions causing amino acid substitutions A→S at position 2217 (corresponding to amino acid substitution A→S at position 2218 as defined using the amino acid sequence of SEQ ID NO: 6 as a reference sequence), T→I at position 2695, and M→T at position 868 was designated as pJ6/JFH-2.1 A2217S (TI/MT).

[0202] Next, cDNA containing nucleotide substitutions causing M→K mutation at position 405 and N→T mutation at position 417 prepared by reverse transcription from the HCV RNA of infection line 4A obtained in Example 13 was used as a template, 10 μl of 10× buffer and 4 μl of 2 mM dNTP mixture attached to the Phusion High-Fidelity DNA Polymerase kit (FINNZYMES), and 1 μl each of 10 μM primers 2099S-2a (5′-ACGGACTGTTTTAGGAAGCA-3′ (SEQ ID NO: 50)) and 3509R-2a (5′-TCTTGTCGCGCCCCGTCA-3′ (SEQ ID NO: 51)) were added, and then deionized water was added to bring the total amount to 49.5 μl in the end. Thereafter, 0.5 μl of Phusion DNA Polymerase (FINNZYMES) was added thereto, and PCR was carried out. PCR was carried out for 30 cycles, with each cycle consisting of 98° C. for 10 seconds, 55° C. for 15 seconds, and 72° C. for 20 seconds. The PCR product was used as a template, 10 μl of 10× buffer and 4 μl of 2 mM dNTP mixture attached to the Phusion High-Fidelity DNA Polymerase kit (FINNZYMES), and 1 μl each of 10 μM primers 2285S-2a (5′-AATTTCACTCGTGGGGATCG-3′ (SEQ ID NO: 52)) and 3280R-IH (5′-TGACCTTCTTCTCCATCGGACTG-3′ (SEQ ID NO: 53)) were added, and then deionized water was added to bring the total amount to 49.5 μl in the end. Thereafter, 0.5 μl of Phusion DNA Polymerase (FINNZYMES) was added thereto, and PCR was carried out. PCR was carried out for 40 cycles, with each cycle consisting of 98° C. for 10 seconds, 55° C. for 15 seconds, and 72° C. for 20 seconds. The resulting PCR product was designated as PCR product No. 33. pJ6/JFH-2.1 A2217S (TI/MT) and the purified PCR product No. 33 were digested with restriction enzyme Kpn I. Each HCV cDNA fragment was fractionated by agarose gel electrophoresis and then purified. These two DNA fragments were mixed with Ligation Mix (Takara Bio Inc.), and the two DNA fragments were ligated to each other. The thus obtained recombinant expression vector having nucleotide substitutions causing amino acid substitutions A→S at position 2217 (corresponding to amino acid substitution A→S at position 2218 as defined using the amino acid sequence of SEQ ID NO: 6 as a reference sequence), T→I at position 2695, M→T at position 868, M→K at position 405, and N→T at position 417 was designated as pJ6/JFH-2.1 A2217S (TI/MT/MK/NT).

[0203] Next, cDNA containing a nucleotide substitution causing I→V mutation at position 1722 prepared by reverse transcription from the HCV RNA of infection line 4A obtained in Example 13 was used as a template, 10 μl of 10× buffer and 4 μl of 2 mM dNTP mixture attached to the LA-Taq DNA Polymerase kit (Takara Bio Inc.), and 1 μl each of 10 μM primers 4547S-2a (5′-AAGTGTGACGAGCTCGCGG-3′ (SEQ ID NO: 54)) and 7677R-IH (5′-TATGACATGGAGCAGCACAC-3′ (SEQ ID NO: 55)) were added, and then deionized water was added to bring the total amount to 49.5 μl in the end. Thereafter, 0.5 μl of LA-Taq DNA Polymerase (Takara Bio Inc.) was added thereto, and PCR was carried out. PCR was carried out for 30 cycles, with each cycle consisting of 95° C. for 30 seconds, 60° C. for 30 seconds, and 72° C. for 3 minutes. The PCR product was used as a template, 10 μl of 10× buffer and 4 μl of 2 mM dNTP mixture attached to the LA-Taq DNA Polymerase kit (Takara Bio Inc.), and 1 μl each of 10 μM primers 4607S-IH (5′-AGAGGGTTGGACGTCTCCATAATACCA-3′ (SEQ ID NO: 56)) and 7214R-NS (5′-CAGGCCGCGCCCAGGCCGGCAAGGCTGGTG-3′ (SEQ ID NO: 57)) were added, and then deionized water was added to bring the total amount to 49.5 μl in the end. Thereafter, 0.5 μl of LA-Taq DNA Polymerase (Takara Bio Inc.) was added thereto, and PCR was carried out. PCR was carried out for 30 cycles, with each cycle consisting of 95° C. for 30 seconds, 60° C. for 30 seconds, and 72° C. for 2 minutes and 30 seconds. The resulting PCR product was designated as PCR product No. 34. pJ6/JFH-2.1 A2217S (TI/MT/MK/NT) and the purified PCR product No. 34 were digested with restriction enzymes Xho I and Blp I. Each HCV cDNA fragment was fractionated by agarose gel electrophoresis and then purified. These two DNA fragments were mixed with Ligation Mix (Takara Bio Inc.), and the two DNA fragments were ligated to each other. The thus obtained recombinant expression vector having nucleotide substitutions causing amino acid substitutions A→S at position 2217 (corresponding to amino acid substitution A→S at position 2218 as defined using the amino acid sequence of SEQ ID NO: 6 as a reference sequence), T→I at position 2695, M→T at position 868, M→K at position 405, N→T at position 417, and I→V at position 1722 was designated as pJ6/JFH-2.1 A2217S (TI/MT/MK/NT/IV).

[0204] Next, cDNA containing a nucleotide substitution causing S→G mutation at position 2204 prepared by reverse transcription from the HCV RNA of infection line 4A obtained in Example 13 was used as a template, 10 μl of 10× buffer and 4 μl of 2 mM dNTP mixture attached to the LA-Taq DNA Polymerase kit (Takara Bio Inc.), and 1 μl each of 10 μM primers 6499S-NS (5′-TAAGACCTGCATGAACACCTGGCAGGGGAC-3′ (SEQ ID NO: 58)) and 3′X-8077R-IH (5′-ACATGATCTGCAGAGAGACCAGTTACGG-3′ (SEQ ID NO: 59)) were added, and then deionized water was added to bring the total amount to 49.5 μl in the end. Thereafter, 0.5 μl of LA-Taq DNA Polymerase (Takara Bio Inc.) was added thereto, and PCR was carried out. PCR was carried out for 30 cycles, with each cycle consisting of 95° C. for 30 seconds, 60° C. for 30 seconds, and 72° C. for 3 minutes. The PCR product was used as a template, 10 μl of 10× buffer and 4 μl of 2 mM dNTP mixture attached to the LA-Taq DNA Polymerase kit (Takara Bio Inc.), and 1 μl each of 10 μM primers 6698S-NS (5′-ATACCATCTCCAGAGTTCTTTTCCTGGGTA-3′ (SEQ ID NO: 60)) and 3′X-75R-2a (5′-TACGGCACCTCTCTGCAGTCA-3′ (SEQ ID NO: 61)) were added, and then deionized water was added to bring the total amount to 49.5 μl in the end. Thereafter, 0.5 μl of LA-Taq DNA Polymerase (Takara Bio Inc.) was added thereto, and PCR was carried out. PCR was carried out for 30 cycles, with each cycle consisting of 95° C. for 30 seconds, 60° C. for 30 seconds, and 72° C. for 2 minutes and 30 seconds. The resulting PCR product was designated as PCR product No. 35. pJ6/JFH-2.1 A2217S (TI/MT/MK/NT/IV) and the purified PCR product No. 35 were digested with restriction enzymes Blp I and Psi I. Each HCV cDNA fragment was fractionated by agarose gel electrophoresis and then purified. These two DNA fragments were mixed with Ligation Mix (Takara Bio Inc.), and the two DNA fragments were ligated to each other. The thus obtained recombinant expression vector having nucleotide substitutions causing amino acid substitutions A→S at position 2217 (corresponding to amino acid substitution A→S at position 2218 as defined using the amino acid sequence of SEQ ID NO: 6 as a reference sequence), T→I at position 2695, M→T at position 868, M→K at position 405, N→T at position 417, I→V at position 1722, and S→G at position 2204 was designated as pJ6/JFH-2. 1 A2217S (TI/MT/MK/NT/IV/SG).

[0205] Next, cDNA containing a nucleotide substitution causing T→A mutation at position 1642 prepared by reverse transcription from the HCV RNA of infection line 4A obtained in Example 13 was used as a template, 10 μl of 10× buffer and 4 μl of 2 mM dNTP mixture attached to the LA-Taq DNA Polymerase kit (Takara Bio Inc.), and 1 μl each of 10 μM primers 4547S-2a (5′-AAGTGTGACGAGCTCGCGG-3′ (SEQ ID NO: 62)) and 7677R-IH (5′-TATGACATGGAGCAGCACAC-3′ (SEQ ID NO: 63)) were added, and then deionized water was added to bring the total amount to 49.5 μl in the end. Thereafter, 0.5 μl of Phusion DNA Polymerase (FINNZYMES) was added thereto, and PCR was carried out. PCR was carried out for 30 cycles, with each cycle consisting of 95° C. for 30 seconds, 60° C. for 30 seconds, and 72° C. for 3 minutes. The PCR product was used as a template, 10 μl of 10× buffer and 4 μl of 2 mM dNTP mixture attached to the LA-Taq DNA Polymerase kit (Takara Bio Inc.), and 1 μl each of 10 μM primers 4607S-IH (5′-AGAGGGTTGGACGTCTCCATAATACCA-3′ (SEQ ID NO: 64)) and 7214R-NS (5′-CAGGCCGCGCCCAGGCCGGCAAGGCTGGTG-3′ (SEQ ID NO: 65)) were added, and then deionized water was added to bring the total amount to 49.5 μl in the end. Thereafter, 0.5 μl of LA-Taq DNA Polymerase (Takara Bio Inc.) was added thereto, and PCR was carried out. PCR was carried out for 30 cycles, with each cycle consisting of 95° C. for 30 seconds, 60° C. for 30 seconds, and 72° C. for 2 minutes and 30 seconds. The resulting PCR product was designated as PCR product No. 36. pJ6/JFH-2.1 A2217S (TI/MT/MK/NT/IV/SG) and the purified PCR product No. 36 were digested with restriction enzyme Xho I. Each HCV cDNA fragment was fractionated by agarose gel electrophoresis and then purified. These two DNA fragments were mixed with Ligation Mix (Takara Bio Inc.), and the two DNA fragments were ligated to each other. The thus obtained recombinant expression vector having nucleotide substitutions causing amino acid substitutions A→S at position 2217 (corresponding to amino acid substitution A→S at position 2218 as defined using the amino acid sequence of SEQ ID NO: 6 as a reference sequence), T→I at position 2695, M→T at position 868, M→K at position 405, N→T at position 417, I→V at position 1722, S→G at position 2204, and T→A at position 1642 was designated as pJ6/JFH-2.1 A2217S (TI/MT/MK/NT/IV/SG/TA). The nucleotide sequence of mutant HCV full-genomic sequence J6/JFH-2.1 A2217S (TI/MT/MK/NT/IV/SG/TA) cloned into pJ6/JFH-2.1 A2217S (TI/MT/MK/NT/IV/SG/TA) is shown in SEQ ID NO: 86 and the amino acid sequence of an HCV virus precursor protein encoded by the nucleotide sequence is shown in SEQ ID NO: 97. Thus, all of the amino acid mutations found in infection line 4A were introduced into the mutant precursor protein encoded by J6/JFH-2.1 A2217S (TI/MT/MK/NT/IV/SG/TA).

[0206] Virus into which all mutations of 4B had been introduced was prepared as follows. First, cDNA containing mutations M→V at position 356 and V→G at position 626 prepared by reverse transcription from the HCV RNA of infection line 4B obtained in Example 13 was used as a template, 10 μl of 10× buffer and 4 μl of 2 mM dNTP mixture attached to the LA-Taq DNA Polymerase kit (Takara Bio Inc.), and 1 μl each of 10 μM primers 44S-IH (5′-CTGTGAGGAACTACTGTCTT-3′ (SEQ ID NO: 66)) and 3189R-IH (5′-CCAGTCCACCTGCCAAGG-3′ (SEQ ID NO: 67)) were added, and then deionized water was added to bring the total amount to 49.5 μl in the end. Thereafter, 0.5 μl of LA-Taq DNA Polymerase (Takara Bio Inc.) was added thereto, and PCR was carried out. PCR was carried out for 30 cycles, with each cycle consisting of 95° C. for 30 seconds, 60° C. for 30 seconds, and 72° C. for 3 minutes. The PCR product was used as a template, 10 μl of 10× buffer and 4 μl of 2 mM dNTP mixture attached to the LA-Taq DNA Polymerase kit (Takara Bio Inc.), and 1 μl each of 10 μM primers 63S-Con.1 (5′-TTCACGCAGAAAGCGTCTAG-3′ (SEQ ID NO: 68)) and 2445R-2a (5′-TCCACGATGTTTTGGTGGAG-3′ (SEQ ID NO: 69)) were added, and then deionized water was added to bring the total amount to 49.5 μl in the end. Thereafter, 0.5 μl of LA-Taq DNA Polymerase (Takara Bio Inc.) was added thereto, and PCR was carried out. PCR was carried out for 30 cycles, with each cycle consisting of 95° C. for 30 seconds, 60° C. for 30 seconds, and 72° C. for 2 minutes and 30 seconds. The resulting PCR product was designated as PCR product No. 37. pJ6/JFH-2.1 A2217S (AT/CS/TI/LP) and the purified PCR product No. 37 were digested with restriction enzymes Bsiw I and Sph I. Each HCV cDNA fragment was fractionated by agarose gel electrophoresis and then purified. These two DNA fragments were mixed with Ligation Mix (Takara Bio Inc.), and the two DNA fragments were ligated to each other. The thus obtained recombinant expression vector having nucleotide substitutions causing amino acid substitutions A→S at position 2217 (corresponding to amino acid substitution A→S at position 2218 as defined using the amino acid sequence of SEQ ID NO: 6 as a reference sequence), A→T at position 148, C→S at position 2219, T→I at position 2695, L→P at position 3016, M→V at position 356, and V→G at position 626) was designated as pJ6/JFH-2.1 A2217S (AT/CS/TI/LP/MV/VG).

[0207] Next, cDNA containing nucleotide substitutions causing I→V mutation at position 1687 and K→R mutation at position 1767 prepared by reverse transcription from the HCV RNA of infection line 4B obtained in Example 13 was used as a template, 10 μl of 10× buffer and 4 μl of 2 mM dNTP mixture attached to the Phusion DNA Polymerase kit (FINNZYMES), and 1 μl each of 10 μM primers 4593S-2a (5′-CTGTGGCATACTACAGAGG-3′ (SEQ ID NO: 70)) and 5970R-2a (5′-TTCTCGCCAGACATGATCTT-3′ (SEQ ID NO: 71)) were added, and then deionized water was added to bring the total amount to 49.5 μl in the end. Thereafter, 0.5 μl of LA-Taq DNA Polymerase (Takara Bio Inc.) was added thereto, and PCR was carried out. PCR was carried out for 35 cycles, with each cycle consisting of 98° C. for 10 seconds, 55° C. for 15 seconds, and 72° C. for 20 seconds. The PCR product was used as a template, 10 μl of 10× buffer and 4 μl of 2 mM dNTP mixture attached to the Phusion High-Fidelity DNA Polymerase kit (FINNZYMES), and 1 μl each of 10 μM primers 4607S-IH (5′-AGAGGGTTGGACGTCTCCATAATACCA-3′ (SEQ ID NO: 72)) and 5970R-2a (5′-TTCTCGCCAGACATGATCTT-3′ (SEQ ID NO: 73)) were added, and then deionized water was added to bring the total amount to 49.5 μl in the end. Thereafter, 0.5 μl of Phusion DNA Polymerase (FINNZYMES) was added thereto, and PCR was carried out. PCR was carried out for 30 cycles, with each cycle consisting of 98° C. for 10 seconds, 55° C. for 15 seconds, and 72° C. for 20 seconds. The resulting PCR product was inserted into a pGEM-T Easy vector. Then the plasmid was used as a template, 10 μl of 10× buffer and 4 μl of 2 mM dNTP mixture attached to the LA-Taq DNA Polymerase kit (Takara Bio Inc.), and 1 μl each of 10 μM primers 4547S-2a (5′-AAGTGTGACGAGCTCGCGG-3′ (SEQ ID NO: 74)) and 7677R-IH (5′-TATGACATGGAGCAGCACAC-3′ (SEQ ID NO: 75)) were added, and then deionized water was added to bring the total amount to 49.5 μl in the end. Thereafter, 0.5 μl of LA-Taq DNA Polymerase (Takara Bio Inc.) was added thereto, and PCR was carried out. PCR was carried out for 30 cycles, with each cycle consisting of 98° C. for 30 seconds, 60° C. for 30 seconds, and 72° C. for 3 minutes. The PCR product was used as a template, 10 μl of 10× buffer and 4 μl of 2 mM dNTP mixture attached to the LA-Taq DNA Polymerase kit (Takara Bio Inc.), and 1 μl each of 10 μM primers 4607S-IH (5′-AGAGGGTTGGACGTCTCCATAATACCA-3′ (SEQ ID NO: 76)) and 7214R-NS (5′-CAGGCCGCGCCCAGGCCGGCAAGGCTGGTG-3′ (SEQ ID NO: 77)) were added, and then deionized water was added to bring the total amount to 49.5 μl in the end. Thereafter, 0.5 μl of LA-Taq DNA Polymerase (Takara Bio Inc.) was added thereto, and PCR was carried out. PCR was carried out for 30 cycles, with each cycle consisting of 95° C. for 30 seconds, 60° C. for 30 seconds, and 72° C. for 2 minutes and 30 seconds. The thus obtained PCR product was designated as PCR product No. 38. pJ6/JFH-2.1 A2217S (AT/CS/TI/LP/MV/VG) and the purified PCR product No. 39 were digested with restriction enzyme Xho I. Each HCV cDNA fragment was fractionated by agarose gel electrophoresis and then purified. These two DNA fragments were mixed with Ligation Mix (Takara Bio Inc.), and the two DNA fragments were ligated to each other. The thus obtained recombinant expression vector having nucleotide substitutions causing amino acid substitutions A→S at position 2217 (corresponding to amino acid substitution A→S at position 2218 as defined using the amino acid sequence of SEQ ID NO: 6 as a reference sequence), A→T at position 148, C→S at position 2219, T→I at position 2695, L→P at position 3016, M→V at position 356, V→G at position 626, T→S at position 329, I→V at position 1687, and K→R at position 1767 was designated as pJ6/JFH-2.1 A2217S (AT/CS/TI/LP/MV/VG/IV/KR). The nucleotide sequence of mutant HCV full-genomic sequence J6/JFH-2.1 A2217S (AT/CS/TI/LP/MV/VG/IV/KR) cloned into pJ6/JFH-2.1 A2217S (AT/CS/TI/LP/MV/VG/IV/KR) is shown in SEQ ID NO: 87 and the amino acid sequence of an HCV virus precursor protein encoded by the nucleotide sequence is shown in SEQ ID NO: 98. Thus, all of the amino acid mutations found in infection line 4B were introduced into the mutant precursor protein encoded by J6/JFH-2.1 A2217S (AT/CS/TI/LP/MV/VG/IV/KR).

### Example 15

### Mutation Analysis for Nucleotide Sequence Resulting from Subculture of JFH-2.1 A2218S RNA Replicating Cells

[0208] Fresh uninfected Huh-7 cells were infected with the culture supernatant of Huh-7 cells (Huh-7 cells into which JFH-2.1 A2218S HCV RNA had been introduced) that contains JFH-2.1 A2218S HCV particles with high infectious titer obtained in Example 8, at moi (multiplicity of infection) of 0.03. The infected cells were subcultured until the amount of Core protein and the infectious titer in the culture supernatant reached 1,000 fmol/L and 1,000 ffu/ml or more, respectively. Infection with the culture supernatant containing the virus and subculture of infected cells were repeated 3 to 4 times and then sequence analysis was conducted for HCV RNA contained in the culture supernatant. Two infection lines were employed and designated as D3 and D4, respectively. First, RNA was extracted from each culture supernatant of Huh-7 cells containing JFH-2.1 A2218S HCV particles of infection line D3 and D4 and then HCV RNA contained therein was amplified by RT-PCR. Random primers (6 mer, Takara Bio Inc.) were used for amplification. Amplification products were cloned into sequencing cloning vectors and then subjected to sequence analysis by a conventional method.

[0209] As a result, in the case of infection line D3, nucleotide substitutions causing amino acid substitutions at 7 positions: 1 position in the E2 region that is in the structural region (I→T at position 414); and 2 positions in the NS3 region (E→Q at position 1510 and R→Q at position 1617), 3 positions in the NS5A region (K→Q at position 2006, A→V at position 2233, and N→S at position 2234); and 1 position in the NS5B region (T→I at position 2695), that are in the nonstructural region, were found. Also, in the case of infection line D4, nucleotide substitutions causing amino acid substitutions at 9 positions: 1 position in E2 region that is in the structural region (V→G at position 387); and 1 position in the NS2 region (V→A at position 828), 2 positions in the NS3 region (R→Q at position 1225 and R→G at position 1283), 1 position in the NS4B region (V→A at position 1883), 3 positions in the NS5A region (S→A at position 2206, K→N at position 2279, and C→R at position 2441), and 2 positions in the NS5B region (T→I at position 2695) that are in the nonstructural region, were found.

### Example 16

### Evaluation of HCV Particle-Producing Capacity of Cells into which Mutant J6/JFH-2.1 A2217S HCV RNA has been Introduced

[0210] HCV full-genome RNA (mutant HCV full-genome RNA) was prepared by techniques similar to those in Example 2 using the expression vectors constructed in Example 14, pJ6/JFH-2.1 A2217S, pJ6/JFH-2.1 A2217S(CS), pJ6/JFH-2.1 A2217S (LP), pJ6/JFH-2.1 A2217S (TI), pJ6/JFH-2.1 A2217S (AT), pJ6/JFH-2.1 A2217S (CS/LP), pJ6/JFH-2.1 A2217S(CS/TI), pJ6/JFH-2.1 A2217S (TI/LP), pJ6/JFH-2.1 A2217S(CS/TI/LP), pJ6/JFH-2.1 A2217S (AT/CS/TI/LP), pJ6/JFH-2.1 A2217S (TI/MT/MK/NT/IV/SG/TA), and pJ6/JFH-2.1 A2217S (AT/CS/TI/LP/MV/VG/IV/KR). Each of the thus obtained HCV full-genome RNAs was introduced into Huh7 cells by electroporation. Thereafter, while subculturing cells in medium (10% fetal calf serum-containing Dulbecco's modified Eagle's medium (DMEM)), HCV Core protein contained in the culture supernatant was quantified over time using an HCV antigen ELISA test kit (Ortho Clinical Diagnostics) to confirm the production of HCV particles (FIG. 12).

[0211] As a result, it was demonstrated that when the above amino acid mutations at 7 or 8 positions were independently introduced into the J6/JFH-2.1 A2217S genome sequence, the RNA was self-replicated efficiently in cells into which the RNA was introduced, and the virus was secreted into the culture supernatant within a short time after the initiation of replication.

### INDUSTRIAL APPLICABILITY

[0212] The HCV replicons according to the present invention prepared using the genome of HCV of genotype 2a isolated from a fulminant hepatitis C patient, replicon-replicating cells into which the HCV replicons are introduced, the method for producing infectious HCV particles in the culture cell system using the HCV replicons, and infectious HCV particles obtained by the method are useful as systems for evaluation of molecules inhibiting HCV replication and HCV infection. The present invention can provide HCV subgenomic replicon RNA and full-genomic replicon RNA having self-replication capacity that is significantly higher than that of HCV subgenomic replicon RNA obtained thus far. These replicon RNAs can be used particularly conveniently for screening for anti-HCV agents that inhibit HCV replication or studies for elucidating the HCV replication mechanism. Also, the HCV full-genomic replicon RNA of the present invention possesses HCV particle-producing capacity that is higher than that of HCV full-genomic replicon RNA obtained thus far, so that it can be used for constructing a system for efficiently producing HCV particles at a high level, with which HCV particles having infectivity can be prepared in vitro in large amounts. Also, the HCV replicons and infectious HCV particles according to the present invention are also useful for use as HCV vaccines or antigens for preparation of anti-HCV antibodies. The method for producing HCV viral particles using multiple mutant replicons according to the present invention is also very useful for in vitro production of HCV viral particles within a short time period.

### SEQUENCE LISTING FREE TEXT

[0213] SEQ ID NOS: 1, 2, 11-13 and 16-87 are synthetic DNAs.
SEQ ID NOS: 88-98 are synthetic polypeptides.

1. A nucleic acid comprising a 5′ untranslated region, an NS3 protein coding region, an NS4A protein coding region, an NS4B protein coding region, an NS5A protein coding region, an NS5B protein coding region, and a 3′ untranslated region of a hepatitis C virus genome, wherein the nucleic acid has nucleotide substitutions causing one or more amino acid substitutions selected from the group consisting of M(1205)K, F(1548)L, C(1615)W, T(1652)N, A(2196)T, A(2218)S, H(2223)Q, Q(2281)R, K(2520)N, and G(2374)S, as defined using the amino acid sequence shown in SEQ ID NO: 6 in the Sequence Listing as a reference sequence, in the NS3 protein coding region, the NS5A protein coding region, or the NS5B protein coding region.

2. The nucleic acid according to claim 1, which has at least a nucleotide substitution causing amino acid substitution A(2218)S in the NS5A protein coding region.

3. The nucleic acid according to claim 1 or 2, which further comprises a Core protein coding region, an E1 protein coding region, an E2 protein coding region, a p7 protein coding region, and an NS2 protein coding region of a hepatitis C virus genome.

4. The nucleic acid according to claim 3, which encodes an amino acid sequence having one or more amino acid substitutions selected from the group consisting of M(1205)K, F(1548)L, C(1615)W, T(1652)N, A(2196)T, A(2218)S, H(2223)Q, Q(2281)R, K(2520)N, and G(2374)S, as defined using the amino acid sequence shown in SEQ ID NO: 6 in the Sequence Listing as a reference sequence, in the amino acid sequence shown in SEQ ID NO: 5 or 6 in the Sequence Listing.

5. The nucleic acid according to claim 3, consisting of the nucleotide sequence shown in SEQ ID NO: 12 or 13 in the Sequence Listing.

6. The nucleic acid according to claim 1, further comprising a marker gene and/or an IRES sequence.

7. The nucleic acid according to claim 1 or 2, which is a subgenomic replicon RNA.

8. The nucleic acid according to claim 3, which is a full-genomic replicon RNA.

9. An expression vector, wherein the nucleic acid according to claim 1 or 2 is operably ligated downstream of a promoter.

10. An expression vector, wherein the nucleic acid according to claim 3 is operably ligated downstream of a promoter.

11. A transformed cell, which is obtained by introducing the full-genomic replicon RNA according to claim 8.

12. A hepatitis C virus particle, which is obtained by culturing the transformed cell according to claim 11.

13. An antibody against the hepatitis C virus particle according to claim 12.

14. A transformed cell, which is obtained by introducing the expression vector according to claim 10.

The application's sequence listing, which the Patent Office published only in electronic form, follows.

SEQUENCE LISTING (98 sequences)

SEQ ID NO: 1 - DNA, 10711 bp, Artificial Sequence
  synthetic DNA
gaattctaatacgactcactatagacccgcccctaataggggcgacactccgccatgaatcactcccctgtgaggaactactgtcttcacgcagaaagcgtctagccatggcgttagtatgagtgtcgtacagcctccaggcccccccctcccgggagagccatagtggtctgcggaaccggtgagtacaccggaattgccgggaagactgggtcctttcttggataaacccactctatgcccggccatttgggcgtgcccccgcaagactgctagccgagtagcgttgggttgcgaaaggccttgtggtactgcctgatagggtgcttgcgagtgccccgggaggtctcgtagaccgtgcatcatgagcacaaatcccaaacctcaaagaaaaaccaacagaaacaccaaccgtcgcccaatgattgaacaagatggattgcacgcaggttctccggccgcttgggtggagaggctattcggctatgactgggcacaacagacaatcggctgctctgatgccgccgtgttccggctgtcagcgcaggggcgcccggttctttttgtcaagaccgacctgtccggtgccctgaatgaactgcaggacgaggcagcgcggctatcgtggctggccacgacgggcgttccttgcgcagctgtgctcgacgttgtcactgaagcgggaagggactggctgctattgggcgaagtgccggggcaggatctcctgtcatctcaccttgctcctgccgagaaagtatccatcatggctgatgcaatgcggcggctgcatacgcttgatccggctacctgcccattcgaccaccaagcgaaacatcgcatcgagcgagcacgtactcggatggaagccggtcttgtcgatcaggatgatctggacgaagagcatcaggggctcgcgccagccgaactgttcgccaggctcaaggcgcgcatgcccgacggcgaggatctcgtcgtgacccatggcgatgcctgcttgccgaatatcatggtggaaaatggccgcttttctggattcatcgactgtggccggctgggtgtggcggaccgctatcaggacatagcgttggctacccgtgatattgctgaagagcttggcggcgaatgggctgaccgcttcctcgtgctttacggtatcgccgctcccgattcgcagcgcatcgccttctatcgccttcttgacgagttcttctgagtttaaaccctctccctcccccccccctaacgttactggccgaagccgcttggaataaggccggtgtgcgtttgtctatatgttattttccaccatattgccgtcttttggcaatgtgagggcccggaaacctggccctgtcttcttgacgagcattcctaggggtctttcccctctcgccaaaggaatgcaaggtctgttgaatgtcgtgaaggaagcagttcctctggaagcttcttgaagacaaacaacgtctgtagcgaccctttgcaggcagcggaaccccccacctggcgacaggtgcctctgcggccaaaagccacgtgtataagatacacctgcaaaggcggcacaaccccagtgccacgttgtgagttggatagttgtggaaagagtcaaatggctctcctcaagcgtattcaacaaggggctgaaggatgcccagaaggtaccccattgtatgggatctgatctggggcctcggtgcacatgctttacatgtgtttagtcgaggttaaaaaaacgtctaggccccccgaaccacggggacgtggttttcctttgaaaaacacgatgataccatggcgcctatcactgcttatgcccagcagacacgaggcctattgggcgccatagtggtgagcatgacgggccgtgacaagacagaacaggccggggagatccaggtcctctccacagtcactcaaaccttcctcgggactaccatctcaggagtcttgtggaccgtctaccacggggctggcaacaagaccctagccggctcgcggggcccggtcacacagatgtactccagcgccgagggagacttggtagggtggcccagtcctcccgggactaaatccatggagccgtgcacgtgcggagcggtcgacctgtacctggtcacgcggaacgctgacgtcatcccggctcggagacgcggggacaagcggggagcgttgctctccccgagacctctctcaactctgaaggggtcttcggggggaccggtgctctgccccaggggccacgttgtcgggatcttccgggcagccatatgctcgcggggcgtggccaagtccatagatttcatccccgttgaggcaattgacatcgtcacgcgctcccccacctttactgacaacagcacgccaccggctgtgccccagacctatcaggttggatacttgcacgccccgactggcagcgggaagagcaccaaagtccctgtcgcatatgccgcccaggggtataaggtgctagtgctcaatccctcggtggccgccaccttggggtttggggcgtacttggccaaggcgcacggcatcaatcctaacattaggactggagtcaggactgtgacgaccggggaggctattacgtattccacgtatggcaagtttctcgctgatgggggctgcgcaggcggcgcctatgacatcatcatatgcgatgagtgccatgccacggatgctaccacccttctcggcatcggaacagttcttgaccaagcagagtcagctggggtcaggctaactgtgctggccacggctacgcctcccggatcaataacaacccctcaccccaacatagaggaggtagctctcggacaggagggtgagatccccttctatgggagagcgatccccctggcccacatcaagggagggaggcacctgatcttctgccactcgaagaaaaagtgtgacgagctcgcggcggccctccgggccatgggcttgaacgctgtggcatactacagagggttggacgtctccataataccagctcaaggagacgtggtggttgtcgccactgacgccctcatgacagggtacactggagactttgactccgtgattgactgcaacgtagcggttactcaagtcgtggacttcagcttggaccccaccttcaccatatccacacaaaccgtcccccaagacgccgtctcacgcagccagcgccgggggcgcacgggcagagggagactgggcatttacaggtacgtttccactggtgagcgagcttcgggaatgtttgacagcgtaacgctctgcgagtgctacgatgcaggggctgcatggtatgatctcacaccagcggaaaccaccgtcaggcttagggcgtatttcaacacgcccggcctgcccgtgtgccaagaccacctcgagttttgggaggcagttttcaccggcctcacacacatagatgcccactacctttcccaaacaaagcaagcgggggagaatttcgcatacctgacagcctatcaggccacagtgtgtgccagagccaaagcccctcccccgtcttgggacgtcatgtggaagtgcctgactcgactcaaacccacgctcgtgggccccacacctctcctgtaccgcctgggttcagttaccaacgatgtcaccttcacacaccctgtgacaaagtacatcgctacttgcatgcaagctgacctcgaggtcatgaccagcacgtgggtcctagccgggggagtcctggctgccatcgccgcgtactgcttggcgactgggtgtgtttccatcatcggccgtttgcacgtcaaccagcgaaccgtcgttgcacctgacaaggaggtcctctatgaggcttttgacgagatggaggagtgtgcttccagagcggccctcattgaggaggcgcaacggatagccgagatgctgaagtctaagatccaaggcttattgcagcaggcttccaagcaggcccaggacatacaaccaaccgtgcaggcttcatggcccaaggtggagcaattctgggccaaacacatgtggaacttcattagcggcatccaatatcttgcgggactgtcaacgctgccagggaaccccgctgtggcctctatgatggcattcagtgccgccatcaccagtccgctgtcgactagcaccaccatccttctcaacatcatgggaggctggctggcgtctcaaattgcgccacccgcaggggccacaggcttcgtggtcagtggcctggtgggggctgccataggcagcgtaggcttgggtaaggtgctggtggacatcttggcagggtacggtgcgggcatttcgggggctctcgtcgcattcaagatcatgtctggcgagaagccctccatggaggatgtcatcaacctgctgcccggaatcctgtccccgggcgccctggtggtgggggtcatttgcgcggccattctgcgccgtcatgtgggaccgggggaaggtgcggtccaatggatgaataggcttattgcctttgcttccagaggaaaccacgtcgcccccacccactatgtgacggagtcagatgcgtcgcagcgcgtgacccaactacttggctctctcaccataactagcctgcttagaaggctccacaattggattactgaggactgccccaccccatgcaatggctcatggctccgcgatgtgtgggactgggtgtgcaccatcctgactgactttaaaaactggctgacctccaagttgttcccaaagctgcccggcctccccttcatctcttgccaaaaggggtataggggcgactgggccggcacgggcatcatggtcacgcggtgcccttgtggcgccaacatttctggcaatgtccgcttcggctctatgagaatcacagggcctaagacctgcatgaacacctggcaggggactttccctatcaactgctacacggagggccaatgcatgccgagacctgcgccaaactttaagaccgccatctggagggtggcggcctcagagtacgcggaggtgacgcggcacgggtcgtactcttacataacagggctgaccgctgacaatctgaaggttccctgccaaataccatctccagagttcttttcctgggtagacggagtacagatccacaggtttgctcccacaccaaagccgttcttccgggatgaggtctcgttcagcgtggggctcaactcatttgtagtcgggtctcagcttccctgcgaccctgaacccgacgcggacgtgttgatgtccatgctaacagatcctggccatatcacggcagaggctgcagcgcggcgcttagcgcgggggtcacccccatctgaggcaagctcctcagcgagccagctgtcggccccgtcgctgcgtgccacctgtgccacccacggcacggcctatgatgtggccatggtggatgctaacctgttcatgaagggggaagtgattcggatagagtccgattccaaagtggtcgttctggactctctcgacccactggccgaagaggtgagcgacgtcgaaccctctataccatcagagtacttgatccccaagaaacaattcccaccagccttgccggcctgggcgcggcctgactacaacccaccgcttgtggaatcgtggaggaagcctgactaccaaccacccactgtcgcgggctgtgctctccccccccccaagaagaccccgacgccccccccaaggaagcgtcggacggtgagactcagtgagagcgccgtgggagacatcctccaacagctggctattaagacctttggccagccccctccaagcggaggcccagacccccccacgggggcgggcgccgccggctccggcggtcagacgccccctgatgagccggctccttcggagacggattctgtctcctccatgcccccccttgagggggagcccggagacccagacctggagcttggccaggtagagccccaaccccccccccaggggggggaggcggctcccgactcagactctgggtcgtggtctacctgctccgaggaggaggattccaccgtgtgctgctccatgtcatactcctggaccggggcccttataactccttgcagccccgaagaggagaagttgccaatcaatcccctgagcaactcattgttgcgctaccacaacaaggtgtactgcactacatcaagaagtgcgtcactgagggccaaaaaggtaacttttgacaggatgcaagtactcgatgcccactatgactcagtcttaaaggacattaagctagcggcctccaaggtcagcgcaaggtccctcagcttggaggaggcgtgcaagctgaccccgccccactctgcgaggtccaaatatggatttggggctaaggaggtccgcagcttgtccgggagggccgtcaaccacatcaagtccgtgtggaaggacctcttggaagactcacaaacaccaatacctacaaccatcatggccaagaatgaggtgttctgcgtgaaccctgctaaggggggcaagaaagcagctcgcctcatcgtttaccccgaccttggtgtcagggtctgcgaaaagatggccctctatgatgttgcacaaaagcttcctcaggcggtgatgggggcctcctatgggttccagtactctcccgcccagcgggtggagtttctcttgaaagcgtgggcggacaagaaagaccctatgggtttttcgtatgatacccgatgctttgactcaactgtcactgagagagacataagaactgaggaggacatatacctgtcctgctccctacccgaggaggcccgcactgccacacactcgctgactgagagactttacgtgggagggcccatgttcaacagcaagggccagacctgcgggtacaggcgttgccgcgctagcggggtgctcaccactagcatggggaataccatcacatgctatgtaaaagccctagcggcctgcaaggccgcagggatagttgcacccacgatgctggtatgcggcgatgacttggttgtcatctcagaaagccaggggactgaggaggacgagcggaacctgagagccttcacggaggctatgaccaggtattctgcccctcctggtgacccccccagaccggaatacgacttggagctgataacatcctgctcctcaaatgtgtctgtggcacttggcccccggggcaaccgcagatactatctgaccagagaccccaccactccaatcgcccgggctgcctgggaaacagtcagacactcccctgtcaattcatggctgggaaacatcatccagtacgctccaaccatatgggttcgtatggtcctgatgacacatttctactccattctcatggcccaagacactctggaccagaaccttaactttgaaatgtatggagctgtgtactctgtaagtcccttggacctcccagccataattgaaaagctccatgggcttgacgctttctctctgcacacatactctcccaacgaactgacgcgagtggcttcagccctcagaaaacttggggcgccacccctcagagcgtggaagagccgggcgcgtgcagtcagagcgtccctcatctcccgtggagggagagcggccgtctgcggtcgatatctcttcaactgggcggtgaagaccaagctcaaactcactccattgccggaggcgcgccatctggatttatccagttggttcaccgtcggcgccggcgggggcgacatttatcacagcgtgtcgcgtgcccgaccccgcttgttactccttagcctactcctactctttgtaggagtaggccttttcctactccccgctcggtagagcggcacacattagctacactccatagctaactgttccattttttttttttttttttttttttttttttttttttttttttttttttttttttttttttttcttttccttcctttctttttcactttacttcattctttcctggtggctccatcttagccctagtcacggctagctgtgaaaggtccgtgagccgcatgactgcagagagtgccgtaactggtctctctgcagatcatgtctagagtcgacctgcaggcatgcaagcttggcgtaatcatggtcatagctgtttcctgtgtgaaattgttatccgctcacaattccacacaacatacgagccggaagcataaagtgtaaagcctggggtgcctaatgagtgagctaactcacattaattgcgttgcgctcactgcccgctttccagtcgggaaacctgtcgtgccagctgcattaatgaatcggccaacgcgcggggagaggcggtttgcgtattgggcgctcttccgcttcctcgctcactgactcgctgcgctcggtcgttcggctgcggcgagcggtatcagctcactcaaaggcggtaatacggttatccacagaatcaggggataacgcaggaaagaacatgtgagcaaaaggccagcaaaaggccaggaaccgtaaaaaggccgcgttgctggcgtttttccataggctccgcccccctgacgagcatcacaaaaatcgacgctcaagtcagaggtggcgaaacccgacaggactataaagataccaggcgtttccccctggaagctccctcgtgcgctctcctgttccgaccctgccgcttaccggatacctgtccgcctttctcccttcgggaagcgtggcgctttctcatagctcacgctgtaggtatctcagttcggtgtaggtcgttcgctccaagctgggctgtgtgcacgaaccccccgttcagcccgaccgctgcgccttatccggtaactatcgtcttgagtccaacccggtaagacacgacttatcgccactggcagcagccactggtaacaggattagcagagcgaggtatgtaggcggtgctacagagttcttgaagtggtggcctaactacggctacactagaagaacagtatttggtatctgcgctctgctgaagccagttaccttcggaaaaagagttggtagctcttgatccggcaaacaaaccaccgctggtagcggtggtttttttgtttgcaagcagcagattacgcgcagaaaaaaaggatctcaagaagatcctttgatcttttctacggggtctgacgctcagtggaacgaaaactcacgttaagggattttggtcatgagattatcaaaaaggatcttcacctagatccttttaaattaaaaatgaagttttaaatcaatctaaagtatatatgagtaaacttggtctgacagttaccaatgcttaatcagtgaggcacctatctcagcgatctgtctatttcgttcatccatagttgcctgactccccgtcgtgtagataactacgatacgggagggcttaccatctggccccagtgctgcaatgataccgcgagacccacgctcaccggctccagatttatcagcaataaaccagccagccggaagggccgagcgcagaagtggtcctgcaactttatccgcctccatccagtctattaattgttgccgggaagctagagtaagtagttcgccagttaatagtttgcgcaacgttgttgccattgctacaggcatcgtggtgtcacgctcgtcgtttggtatggcttcattcagctccggttcccaacgatcaaggcgagttacatgatcccccatgttgtgcaaaaaagcggttagctccttcggtcctccgatcgttgtcagaagtaagttggccgcagtgttatcactcatggttatggcagcactgcataattctcttactgtcatgccatccgtaagatgcttttctgtgactggtgagtactcaaccaagtcattctgagaatagtgtatgcggcgaccgagttgctcttgcccggcgtcaatacgggataataccgcgccacatagcagaactttaaaagtgctcatcattggaaaacgttcttcggggcgaaaactctcaaggatcttaccgctgttgagatccagttcgatgtaacccactcgtgcacccaactgatcttcagcatcttttactttcaccagcgtttctgggtgagcaaaaacaggaaggcaaaatgccgcaaaaaagggaataagggcgacacggaaatgttgaatactcatactcttcctttttcaatattattgaagcatttatcagggttattgtctcatgagcggatacatatttgaatgtatttagaaaaataaacaaataggggttccgcgcacatttccccgaaaagtgccacctgacgtctaagaaaccattattatcatgacattaacctataaaaataggcgtatcacgaggccctttcgtctcgcgcgtttcggtgatgacggtgaaaacctctgacacatgcagctcccggagacggtcacagcttgtctgtaagcggatgccgggagcagacaagcccgtcagggcgcgtcagcgggtgttggcgggtgtcggggctggcttaactatgcggcatcagagcagattgtactgagagtgcaccatatgcggtgtgaaataccgcacagatgcgtaaggagaaaataccgcatcaggcgccattcgccattcaggctgcgcaactgttgggaagggcgatcggtgcgggcctcttcgctattacgccagctggcgaaagggggatgtgctgcaaggcgattaagttgggtaacgccagggttttcccagtcacgacgttgtaaaacgacggccagt

SEQ ID NO: 2 - DNA, 10711 bp, Artificial Sequence
  synthetic DNA
gaattctaatacgactcactatagacccgcccctaataggggcgacactccgccatgaatcactcccctgtgaggaactactgtcttcacgcagaaagcgtctagccatggcgttagtatgagtgtcgtacagcctccaggcccccccctcccgggagagccatagtggtctgcggaaccggtgagtacaccggaattgccgggaagactgggtcctttcttggataaacccactctatgcccggccatttgggcgtgcccccgcaagactgctagccgagtagcgttgggttgcgaaaggccttgtggtactgcctgatagggtgcttgcgagtgccccgggaggtctcgtagaccgtgcatcatgagcacaaatcccaaacctcaaagaaaaaccaacagaaacaccaaccgtcgcccaatgattgaacaagatggattgcacgcaggttctccggccgcttgggtggagaggctattcggctatgactgggcacaacagacaatcggctgctctgatgccgccgtgttccggctgtcagcgcaggggcgcccggttctttttgtcaagaccgacctgtccggtgccctgaatgaactgcaggacgaggcagcgcggctatcgtggctggccacgacgggcgttccttgcgcagctgtgctcgacgttgtcactgaagcgggaagggactggctgctattgggcgaagtgccggggcaggatctcctgtcatctcaccttgctcctgccgagaaagtatccatcatggctgatgcaatgcggcggctgcatacgcttgatccggctacctgcccattcgaccaccaagcgaaacatcgcatcgagcgagcacgtactcggatggaagccggtcttgtcgatcaggatgatctggacgaagagcatcaggggctcgcgccagccgaactgttcgccaggctcaaggcgcgcatgcccgacggcgaggatctcgtcgtgacccatggcgatgcctgcttgccgaatatcatggtggaaaatggccgcttttctggattcatcgactgtggccggctgggtgtggcggaccgctatcaggacatagcgttggctacccgtgatattgctgaagagcttggcggcgaatgggctgaccgcttcctcgtgctttacggtatcgccgctcccgattcgcagcgcatcgccttctatcgccttcttgacgagttcttctgagtttaaaccctctccctcccccccccctaacgttactggccgaagccgcttggaataaggccggtgtgcgtttgtctatatgttattttccaccatattgccgtcttttggcaatgtgagggcccggaaacctggccctgtcttcttgacgagcattcctaggggtctttcccctctcgccaaaggaatgcaaggtctgttgaatgtcgtgaaggaagcagttcctctggaagcttcttgaagacaaacaacgtctgtagcgaccctttgcaggcagcggaaccccccacctggcgacaggtgcctctgcggccaaaagccacgtgtataagatacacctgcaaaggcggcacaaccccagtgccacgttgtgagttggatagttgtggaaagagtcaaatggctctcctcaagcgtattcaacaaggggctgaaggatgcccagaaggtaccccattgtatgggatctgatctggggcctcggtgcacatgctttacatgtgtttagtcgaggttaaaaaaacgtctaggccccccgaaccacggggacgtggttttcctttgaaaaacacgatgatactatggcgcctatcactgcttatgcccagcagacacgaggcctattgggcgccatagtggtgagcatgacgggccgtgacaagacagaacaggccggggagatccaggtcctctccacagtcactcaaaccttcctcgggactaccatctcaggagtcttgtggaccgtctaccacggggctggcaacaagaccctagccggctcgcggggcccggtcacacagatgtactccagcgccgagggagacttggtagggtggcccagtcctcccgggactaaatccatggagccgtgcacgtgcggagcggtcgacctgtacctggtcacgcggaacgctgacgtcatcccggctcggagacgcggggacaagcggggagcgttgctctccccgagacctctctcgaccttgaaggggtcctcagggggaccggtgctttgccccaggggccacgttgttgggatcttccgggcagccatatgctctcggggcgtggccaagtccatagacttcatccccgttgagatgcttgacatcgtcacgcgctcccccacctttaccgacaacagcacgccaccggctgtgccccagacctatcaggttggatacctgcacgccccaaccggcagcgggaagagcaccaaggtccctgttgcatacgccgcccaggggtacaaagtactagtgctgaatccctcggtggcggccaccctggggttcggggcatacttggccaaggcacatggcatcaatcccaatattaggactggagtcaggactgtgacgactggggaggccatcacgtactccacgtatggcaagttcctcgccgatgggggctgtgcaggcggcgcctatgacatcatcatatgcgatgaatgccacgccacggacgctaccacccttctcggcatcggaacagttcttgaccaagcagagtcagctggggtcaggctaactgtgctggccacggctacgcctcccggatcaataacaacccctcaccccaacatagaggaggtagctctcggacaggagggtgagatccccttctatgggagagcgatccccctggcccacatcaagggagggaggcacctgatcttctgccactcgaagaaaaagtgtgacgagctcgcggcggccctccgggccatgggcttgaacgctgtggcatactacagagggttggacgtctccataataccagctcaaggagacgtggtggttgtcgccactgacgccctcatgacagggtacactggagactttgactccgtgattgactgcaacgtagcggttactcaagtcgtggacttcagcttggaccccaccttcaccatatccacacaaaccgtcccccaagacgccgtctcacgcagccagcgccgggggcgcacgggcagagggagactgggcatttacaggtacgtttccactggtgagcgagcttcgggaatgtttgacagcgtaacgctctgcgagtgctacgatgcaggggctgcatggtatgatctcacaccagcggaaaccaccgtcaggcttagggcgtatttcaacacgcccggcctgcccgtgtgccaagaccacctcgagttttgggaggcagttttcaccggcctcacacacatagatgcccactacctttcccaaacaaagcaagcgggggagaatttcgcatacctgacagcctatcaggccacagtgtgtgccagagccaaagcccctcccccgtcttgggacgtcatgtggaagtgcctgactcgactcaaacccacgctcgtgggccccacacctctcctgtaccgcctgggttcagttaccaacgatgtcaccttcacacaccctgtgacaaagtacatcgctacttgcatgcaagctgacctcgaggtcatgaccagcacgtgggtcctagccgggggagtcctggctgccatcgccgcgtactgcttggcgactgggtgtgtttccatcatcggccgtttgcacgtcaaccagcgaaccgtcgttgcacctgacaaggaggtcctctatgaggcttttgacgagatggaggagtgtgcttccagagcggccctcattgaggaggcgcaacggatagccgagatgctgaagtctaagatccaaggcttattgcagcaggcttccaagcaggcccaggacatacaaccaaccgtgcaggcttcatggcccaaggtggagcaattctgggccaaacacatgtggaacttcattagcggcatccaatatcttgcgggactgtcaacgctgccagggaaccccgctgtggcctctatgatggcattcagtgccgccatcaccagtccgctgtcgactagcaccaccatccttctcaacatcatgggaggctggctggcgtctcaaattgcgccacccgcaggggccacaggcttcgtggtcagtggcctggtgggggctgccataggcagcgtaggcttgggtaaggtgctggtggacatcttggcagggtacggtgcgggcatttcgggggctctcgtcgcattcaagatcatgtctggcgagaagccctccatggaggatgtcatcaacctgctgcccggaatcctgtccccgggcgccctggtggtgggggtcatttgcgcggccattctgcgccgtcatgtgggaccgggggaaggtgcggtccaatggatgaataggcttattgcctttgcttccagaggaaaccacgtcgcccccacccactatgtgacggagtcagatgcgtcgcagcgcgtgacccaactacttggctctctcaccataactagcctgcttagaaggctccacaattggattactgaggactgccccaccccatgcaatggctcatggctccgcgatgtgtgggactgggtgtgcaccatcctgactgactttaaaaactggctgacctccaagttgttcccaaagctgcccggcctccccttcatctcttgccaaaaggggtataggggcgactgggccggcacgggcatcatggtcacgcggtgcccttgtggcgccaacatttctggcaatgtccgcttcggctctatgagaatcacagggcctaagacctgcatgaacacctggcaggggactttccctatcaactgctacacggagggccaatgcatgccgagacctgcgccaaactttaagaccgccatctggagggtggcggcctcagagtacgcggaggtgacgcggcacgggtcgtactcttacataacagggctgaccgctgacaatctgaaggttccctgccaaataccatctccagagttcttttcctgggtagacggagtacagatccacaggtttgctcccacaccaaagccgttcttccgggatgaggtctcgttcagcgtggggctcaactcatttgtagtcgggtctcagcttccctgcgaccctgaacccgacgcggacgtgttgatgtccatgctaacagatcctggccatatcacggcagaggctgcagcgcggcgcttagcgcgggggtcacccccatctgaggcaagctcctcagcgagccagctgtcggccccgtcgctgcgtgccacctgtgccacccacggcacggcctatgatgtggccatggtggatgctaacctgttcatgaagggggaagtgattcggatagagtccgattccaaagtggtcgttctggactctctcgacccactggccgaagaggtgagcgacgtcgaaccctctataccatcagagtacttgatccccaagaaacaattcccaccagccttgccggcctgggcgcggcctgactacaacccaccgcttgtggaatcgtggaggaagcctgactaccaaccacccactgtcgcgggctgtgctctccccccccccaagaagaccccgacgccccccccaaggaagcgtcggacggtgagactcagtgagagcgccgtgggagacatcctccaacagctggctattaagacctttggccagccccctccaagcggaggcccagacccccccacgggggcgggcgccgccggctccggcggtcagacgccccctgatgagccggctccttcggagacggattctgtctcctccatgcccccccttgagggggagcccggagacccagacctggagcttggccaggtagagccccaaccccccccccaggggggggaggcggctcccgactcagactctgggtcgtggtctacctgctccgaggaggaggattccaccgtgtgctgctccatgtcatactcctggaccggggcccttataactccttgcagccccgaagaggagaagttgccaatcaatcccctgagcaactcattgttgcgctaccacaacaaggtgtactgcactacatcaagaagtgcgtcactgagggccaaaaaggtaacttttgacaggatgcaagtactcgatgcccactatgactcagtcttaaaggacattaagctagcggcctccaaggtcagcgcaaggtccctcagcttggaggaggcgtgcaagctgaccccgccccactctgcgaggtccaaatatggatttggggctaaggaggtccgcagcttgtccgggagggccgtcaaccacatcaagtccgtgtggaaggacctcttggaagactcacaaacaccaatacctacaaccatcatggccaagaatgaggtgttctgcgtgaaccctgctaaggggggcaagaaagcagctcgcctcatcgtttaccccgaccttggtgtcagggtctgcgaaaagatggccctctatgatgttgcacaaaagcttcctcaggcggtgatgggggcctcctatgggttccagtactctcccgcccagcgggtggagtttctcttgaaagcgtgggcggacaagaaagaccctatgggtttttcgtatgatacccgatgctttgactcaactgtcactgagagagacataagaactgaggaggacatatacctgtcctgctccctacccgaggaggcccgcactgccacacactcgctgactgagagactttacgtgggagggcccatgttcaacagcaagggccagacctgcgggtacaggcgttgccgcgctagcggggtgctcaccactagcatggggaataccatcacatgctatgtaaaagccctagcggcctgcaaggccgcagggatagttgcacccacgatgctggtatgcggcgatgacttggttgtcatctcagaaagccaggggactgaggaggacgagcggaacctgagagccttcacggaggctatgaccaggtattctgcccctcctggtgacccccccagaccggaatacgacttggagctgataacatcctgctcctcaaatgtgtctgtggcacttggcccccggggcaaccgcagatactatctgaccagagaccccaccactccaatcgcccgggctgcctgggaaacagtcagacactcccctgtcaattcatggctgggaaacatcatccagtacgctccaaccatatgggttcgtatggtcctgatgacacatttctactccattctcatggcccaagacactctggaccagaaccttaactttgaaatgtatggagctgtgtactctgtaagtcccttggacctcccagccataattgaaaagctccatgggcttgacgctttctctctgcacacatactctcccaacgaactgacgcgagtggcttcagccctcagaaaacttggggcgccacccctcagagcgtggaagagccgggcgcgtgcagtcagagcgtccctcatctcccgtggagggagagcggccgtctgcggtcgatatctcttcaactgggcggtgaagaccaagctcaaactcactccattgccggaggcgcgccatctggatttatccagttggttcaccgtcggcgccggcgggggcgacatttatcacagcgtgtcgcgtgcccgaccccgcttgttactccttagcctactcctactctttgtaggagtaggccttttcctactccccgctcggtagagcggcacacattagctacactccatagctaactgttccattttttttttttttttttttttttttttttttttttttttttttttttttttttttttttttcttttccttcctttctttttcactttacttcattctttcctggtggctccatcttagccctagtcacggctagctgtgaaaggtccgtgagccgcatgactgcagagagtgccgtaactggtctctctgcagatcatgtctagagtcgacctgcaggcatgcaagcttggcgtaatcatggtcatagctgtttcctgtgtgaaattgttatccgctcacaattccacacaacatacgagccggaagcataaagtgtaaagcctggggtgcctaatgagtgagctaactcacattaattgcgttgcgctcactgcccgctttccagtcgggaaacctgtcgtgccagctgcattaatgaatcggccaacgcgcggggagaggcggtttgcgtattgggcgctcttccgcttcctcgctcactgactcgctgcgctcggtcgttcggctgcggcgagcggtatcagctcactcaaaggcggtaatacggttatccacagaatcaggggataacgcaggaaagaacatgtgagcaaaaggccagcaaaaggccaggaaccgtaaaaaggccgcgttgctggcgtttttccataggctccgcccccctgacgagcatcacaaaaatcgacgctcaagtcagaggtggcgaaacccgacaggactataaagataccaggcgtttccccctggaagctccctcgtgcgctctcctgttccgaccctgccgcttaccggatacctgtccgcctttctcccttcgggaagcgtggcgctttctcatagctcacgctgtaggtatctcagttcggtgtaggtcgttcgctccaagctgggctgtgtgcacgaaccccccgttcagcccgaccgctgcgccttatccggtaactatcgtcttgagtccaacccggtaagacacgacttatcgccactggcagcagccactggtaacaggattagcagagcgaggtatgtaggcggtgctacagagttcttgaagtggtggcctaactacggctacactagaagaacagtatttggtatctgcgctctgctgaagccagttaccttcggaaaaagagttggtagctcttgatccggcaaacaaaccaccgctggtagcggtggtttttttgtttgcaagcagcagattacgcgcagaaaaaaaggatctcaagaagatcctttgatcttttctacggggtctgacgctcagtggaacgaaaactcacgttaagggattttggtcatgagattatcaaaaaggatcttcacctagatccttttaaattaaaaatgaagttttaaatcaatctaaagtatatatgagtaaacttggtctgacagttaccaatgcttaatcagtgaggcacctatctcagcgatctgtctatttcgttcatccatagttgcctgactccccgtcgtgtagataactacgatacgggagggcttaccatctggccccagtgctgcaatgataccgcgagacccacgctcaccggctccagatttatcagcaataaaccagccagccggaagggccgagcgcagaagtggtcctgcaactttatccgcctccatccagtctattaattgttgccgggaagctagagtaagtagttcgccagttaatagtttgcgcaacgttgttgccattgctacaggcatcgtggtgtcacgctcgtcgtttggtatggcttcattcagctccggttcccaacgatcaaggcgagttacatgatcccccatgttgtgcaaaaaagcggttagctccttcggtcctccgatcgttgtcagaagtaagttggccgcagtgttatcactcatggttatggcagcactgcataattctcttactgtcatgccatccgtaagatgcttttctgtgactggtgagtactcaaccaagtcattctgagaatagtgtatgcggcgaccgagttgctcttgcccggcgtcaatacgggataataccgcgccacatagcagaactttaaaagtgctcatcattggaaaacgttcttcggggcgaaaactctcaaggatcttaccgctgttgagatccagttcgatgtaacccactcgtgcacccaactgatcttcagcatcttttactttcaccagcgtttctgggtgagcaaaaacaggaaggcaaaatgccgcaaaaaagggaataagggcgacacggaaatgttgaatactcatactcttcctttttcaatattattgaagcatttatcagggttattgtctcatgagcggatacatatttgaatgtatttagaaaaataaacaaataggggttccgcgcacatttccccgaaaagtgccacctgacgtctaagaaaccattattatcatgacattaacctataaaaataggcgtatcacgaggccctttcgtctcgcgcgtttcggtgatgacggtgaaaacctctgacacatgcagctcccggagacggtcacagcttgtctgtaagcggatgccgggagcagacaagcccgtcagggcgcgtcagcgggtgttggcgggtgtcggggctggcttaactatgcggcatcagagcagattgtactgagagtgcaccatatgcggtgtgaaataccgcacagatgcgtaaggagaaaataccgcatcaggcgccattcgccattcaggctgcgcaactgttgggaagggcgatcggtgcgggcctcttcgctattacgccagctggcgaaagggggatgtgctgcaaggcgattaagttgggtaacgccagggttttcccagtcacgacgttgtaaaacgacggccagt

SEQ ID NO: 3 - DNA, 9686 bp, Hepatitis C virus
acccgcccctaataggggcgacactccgccatgaatcactcccctgtgaggaactactgtcttcacgcagaaagcgtctagccatggcgttagtatgagtgtcgtacagcctccaggcccccccctcccgggagagccatagtggtctgcggaaccggtgagtacaccggaattgccgggaagactgggtcctttcttggataaacccactctatgcccggccatttgggcgtgcccccgcaagactgctagccgagtagcgttgggttgcgaaaggccttgtggtactgcctgatagggtgcttgcgagtgccccgggaggtctcgtagaccgtgcatcatgagcacaaatcccaaacctcaaagaaaaaccaacagaaacaccaaccgtcgcccacaagacgtcaagtttccgggcggcggccagatcgttggcggagtatacttgctgccgcgcaggggccccaggttgggtgtgcgcgcggcaaggaaaacttcggagcggtcacagccccgtgggagacgccagcccatccccaaagatcggcgtcccactggcaagtcctggggaaaaccaggatacccttggcccttatatgggaacgaggggctcggctgggcaggatggctcctgtccccccagggctcccgtccctcttggggccccactgacccccggcgtaggtcgcgcaatgtgggtaaggtcatcgacaccctaacgtgcggcttcgccgacctcatggggtacatccccgtcgtaggcgccccgcttggcggtgtcgccagagctctcgcgcatggcgtgagggccctggaggacggggtcaactatgcaacagggaacttacccggttgccccttttctatcttcttgctggccctactgtcctgcatcaccactccggtctcagctgcccaggtgaaaaacaccagtgacatctacatggtgactaacgactgtcccaacagcagcatcacctggcagcttagggccgcagtcctccacgtccccggatgtgtcccgtgtgagaaagtggggaatacatctcagtgctggacgccggtctcacccaatgtggctgtgcagcaacccggcgccctcacgcggggcttgcggacgcacatcgatatcgttgtaatgtccgctacgctctgctccgccctctatgtgggggacctctgcggcggggtaatgctcgcagcycagatrttcatcgtctcgccgcaacaccattggttcgtgcaagagtgcaactgctccatctaccctggcaccatcaccggwcatcgtatggcatgggacatgatgatgaactggtcgcccacagctaccatgatcctggcgtacgcgacacgcgttcccgaggtcatcatagacatcattagcggggctcactggggtgtcatgttcggcctggcctacttctctatgcagggagcgtgggcgaaagtcgttgtcatcctcctgctggccgctggggtggacgcacrkrscaccttcgtcattggggsccaggttgcgcgcaccgccagcrgccttcatrgcttgttcaccgycggcgctmagcagaacatccagctkatcaactccaatggcagttggcacatcaaccgcactgccctgaactgyaatgactctttgaacaccggcttcctcgcgtccctgttctacaccaatcgcttcaactcgtcrggatgcccagaacgtctggcatcctgccgtaggattgaggccttcaggataggatggggccacttgcaatatgagcacaatgtcaccaattcagaggatatgagaccatactgctggcattatccacccaaaccttgtggtatagtccccgcgaggtctgtgtgtggcccggtgtactgtttcacacccagcccagtagtagtgggcacgaccgacaggcgtggagtgcccacttacacgtggggggagaatgagacggacgtcttcctactgaacagcacccggccaccgcaggggtcatggttcggctgtacgtggatgaactccactggcttcaccaagacttgtggcgcaccaccttgccgcattagagctgatttcaatgccagcacggacctgttgtgccccacggactgttttaggaaacaccctgacgccacttacatcaagtgtggctccgggccctggctcacgcccagatgcctggtcgactacccctacaggctctggcactacccctgcacagtcaactatagcatcttcaagataaggatgtacgtggggggggttgaacacaggcttacagctgcctgtaacttcacccgcggggatccttgcaacttggatgacagagacagaagtcaactgtcccccttgttgcactctaccacggagtgggccatcttgccctgcacttactctgacctgcccgccttgtcgaccggtctcctccacctccaccaaaacatcgtggacgtgcaatacatgtacggcctttcaccagccgtcacgaagtacatagtccggtgggagtgggtagtgctcttgttcctgctcttggcggacgccagggtctgtgcctgtgtatggatgctcatcctgctgggccaagccgaggcagccctagagaagctggttgttttgcacgccgcgagtgcggctggctgcaatggctttctatatttcatcatctttttcgtggctgcgtggtgcatcaagggtcgagtggtccccttggctacctattccctcatcggcctatggtccttcttcctactgctcctagcattgcctcaacaggcttatgcttatgatgcaactgtgcatggacaaataggcgtggccctgttggtgctgctcaccctctttacactcaccccggcatataagaccctcctgggccggtgtctgtggtggctgtgctatctcctgaccttgggagaggccctcgtccaggagtgggcaccctccatgcaggcgcgcggtggccgggatggcatcatatgggctgccaccatattctgcccgggtgtggtgtttgacataaccaagtggcttttggcgatacttggacctggttatctcctaagagatgctttgacacgcgtgccgtatttcgtcagagcccacgctctgctgagaatgtgcgccatggtgaagcacctcgtggggggtaagtacgtccagatggcgctattaacccttggtaggtggactggcacttacatctacgaccacctcgcccccatgtcggattgggctgccagcggcctgcgggacctggcggtcgctgtggaacctatcatcttcagtccgatggagaaaaaagtcatcgtatggggagcggagacagccgcgtgcggggacatcttgcacggacttcccgtgtctgctcggcttggtcgagagatccttcttggcccagctgacggctacacctctaaggggtggaagcttcttgcgcctatcactgcttatgcccagcagacacgaggtctcttgggcgccatagtggtgagcatgacaggccgtgacaaaacggaacaggccggggagatccaagtcctctccacagtcactcaaaccttcctcgggactaccatctcaggagtcttgtggaccgtctaccacggggctggcaacaagaccctagccggctcgcggggcccggtcacacagatgtactccagcgccgagggagacttggtagggtggcccagtcctcccgggactaaatccatggagccgtgcacgtgcggagcggtcgacctgtacctggtcacgcggaacgctgacgtcatcccggctcggagacgcggggacaagcggggagcgttgctctccccgagacctctctcaactctgaaggggtcttcggggggaccggtgctctgccccaggggccacgttgtcgggatcttccgggcagccatatgctcgcggggcgtggccaagtccatagatttcatccccgttgaggcaattgacatcgtcacgcgctcccccacctttactgacaacagcacgccaccggctgtgccccagacctatcaggttggatacttgcacgccccgactggcagcgggaagagcaccaaagtccctgtcgcatatgccgcccaggggtataaggtgctagtgctcaatccctcggtggccgccaccttggggtttggggcgtacttggccaaggcgcacggcatcaatcctaacattaggactggagtcaggactgtgacgaccggggaggctattacgtattccacgtatggcaagtttctcgctgatgggggctgcgcaggcggcgcctatgacatcatcatatgcgatgagtgccatgccacggatgctaccacccttctcggcatcggaacagttctagaccaagcagagtcagctggggtcaggctaactgtgctggccacggctacgcctcccggatcaataacaacccctcaccccaacatagaggaggtagctctcggacaggagggtgagatccccttctatgggagagcgatccccctggcccacatcaagggagggaggcacctgatcttctgccactcgaagaaaaagtgtgacgagctcgcggcggccctccgggccatgggcttgaacgctgtggcatactacagagggttggacgtctccataataccagctcaaggagacgtggtggttgtcgccactgacgccctcatgacagggtacactggagactttgactccgtgatygactgcaacgtagcggttactcaagtcgtggacttcagcttggaccccaccttcaccatatccacacaaaccgtcccccaagacgccgtctcacgcagccagcgccgggggcgcacgggcagagggagactgggcatttacaggtacgtttccactggtgagcgagcttcgggaatgtttgacagcgtaacgctctgcgagtgctacgatgcaggggctgcatggtatgatctcacaccagcggaaaccaccgtcaggcttagggcgtatttcaacacgcccggcctgcccgtgtgccaagaccacctcgagttttgggaggcagttttcaccggcctcacacacatagatgcccactacctttcccaaacaaagcaagcgggggagaatttcgcatacctgacagcctatcaggccacagtgtgtgccagagccaaagcccctcccccgtcttgggacgtcatgtggaagtgcctgactcgactcaaacccacgctcgtgggccccacacctctcctgtaccgcctgggttcagttaccaacgatgtcaccttcacacaccctgtgacaaagtacatcgctacttgcatgcaagctgacctcgaggtcatgaccagcacgtgggtcctagccgggggagtcctggctgccatcgccgcgtactgcttggcgactgggtgtgtttccatcatcggccgtttgcacgtcaaccagcgaaccgtcgttgcacctgacaaggaggtcctctatgaggcttttgacgagatggaggagtgtgcttctagagcggccctcattgaggaggcgcaacggatagccgagatgctgaagtctaagatccaaggcttattgcagcaggcttccaagcaggcccaggacatacaaccaaccgtgcaggcttcatggcccaaggtggagcaattctgggccaaacacatgtggaacttcattagcggcatccaatatcttgcgggactgtcaacgctgccagggaaccccgctgtggcctctatgatggcattcagtgccgccatcaccagtccgctgtcgactagcaccaccatccttctcaacatcatgggaggctggctggcgtctcaaattgcgccacccgcaggggccacaggcttcgtggtcagtggcctggtgggggctgccataggcagcgtaggcttgggtaaggtgctggtggacatcttggcagggtacggtgcgggcatttcgggggctctcgtcgcattcaagatcatgtctggcgagaagccctccatggaggatgtcatcaacctgctgcccggaatcctgtccccgggcgccctggtggtgggggtcatttgcgcggccattctgcgccgtcatgtgggaccgggggaaggtgcggtccaatggatgaataggcttattgcctttgcttccagaggaaaccacgtcgcccccacccactatgtgacggagtcagatgcgtcgcagcgcgtgacccaactacttggctctctcaccataactagcctgcttagaaggctccacaattggattactgaggactgccccaccccatgcaatggctcatggctccgcgatgtgtgggactgggtgtgcaccatcctgactgactttaaaaactggctgacctccaagttgttcccaaagctgcccggcctccccttcatctcttgycaaaaggggtayargggcgactgggccggcacgggcatcatggtcacgcggtgcccttgtggcgccaacatttctggcaatgtccgcttcggctctatgagaatcacagggcctaagacctgcatgaacacctggcaggggactttccctatcaactgctacacggagggccaatgcatgccgagacctgcgccaaactttaagaccgccatctggagggtggcggcctcagagtacgcggaggtgacgcggcacgggtcgtactcttacataacagggctgaccgctgacaatctgaaggttccctgccaaataccatctccagaattcttttcctgggtagacggagtacagatccacaggtttgctcccacaccaaagccgttcttccgggatgaggtctcgttcagcgtggggctcaactcatttgtagtcgggtctcagcttccctgcgaccctgaacccgacgcggacgtgttgatgtccatgctaacagatccaggccatatcacggcagaggctgcagcgcggcgcttagcgcgggggtcacccccatctgaggcaagctcctcagcaagccagctgtcggccccgtcgctgcgtgccacctgtgccacccacggcacggcctatgatgtggccatggtggatgctaacctgttcatgaagggggaagtgattcggatagagtccgattccaaagtggtcgttctggactctctcgacccactggccgaagaggtgagcgacgtcgaaccctctataccatcagagtacttgatccccaagaaacaattcccaccagccttgccggcctgggcgcggcctgactacaacccaccgcttgtggaatcgtggaggaagcctgactaccaaccacccactgtcgcgggctgtgctctccccccccccaagaaraccccgacgccccccccaaggaagcgtcggacggkgaraytyartgaragcgccgkgggaaacatcctccaacagytggytwttaaaacctttggccagccccctycaarsggaggsccaracccccccacgggggsgggsgccgccggttccggsggtyaaacgccccctkatkarccgggtyctttggaracggattttgtttyctccawgcccccccttkagggggagsccggaracccaracctggaggttggscaggtaaagccccaaccccccccccaggggggggaggcggctcccgactcagactctgggtcgtggtctacctgctccgaggaggaggattccgccgtgtgctgctccatgtcatactcctggaccggggcccttataactccttgcagccccgaagaggagaagttgccaatcaatcccctgagcaactcattgttgcgctaccacaacaaggtgtactgcactacatcaagaagtgcgtcactgagggccaaaaaggtaacttttgacaggatgcaagtactcgatgcccactatgactcagtcttaaaggacattaagctagcggcctccaaggtcagcgcaaggtccctcagcttggaggaggcgtgcaagctgaccccgccccactctgcgaggtccaaatatggatttggggctaaggaggtccgcagcttgtccgggagggccgtcaaccacatcaagtccgtgtggaaggacctcttggaagactcacaaacaccaatacctacaaccatcatggccaagaatgaggtgttctgcgtgaaccctgctaaagggggcaagaaagcagctcgcctcatcgtttaccccgaccttggtgtcagggtctgcgaaaagatggccctctatgatgttgcacaaaagcttcctcaggcggtgatgggggcctcctatgggttccagtactctcccgcccagcgggtggagtttctcttgaaagcgtgggcggacaagaaagaccctatgggtttttcgtatgatacccgatgctttgactcaactgtcactgagagagacataagaactgaggaggacatatacctgtcctgctccctacccgaggaggcccgcactgccatacactcgctgactgagagactttacgtgggagggcccatgttcaacagcaagggccagacctgcgggtacaggcgttgccgcgctagcggggtgctcaccactagcatggggaataccatcacatgctatgtaaaagccctagcggcctgcaaggccgcagggatagttgcacccacgatgctggtatgcggcgatgacttggttgtcatctcagaaagccaggggactgaggaggacgagcggaacctgagagccttcacggaggctatgaccaggtattctgcccctcctggtgacccccccagaccggaatacgacttggagctgataacatcctgctcctcaaatgtgtctgtggcacttggcccccggggcaaccgcagatactatctgaccagagaccccaccactccaatcgcccgggctgcctgggaaacagtcagacactcccctgtcaattcatggctgggaaacatcatccagtacgctccaaccatatgggttcgtatggtcctgatgacacatttctactccattctcatggcccaagacactctggaccagaaccttaactttgaaatgtatggagctgtgtactctgtaagtcccttggacctcccagccataattgaaaagctccatgggcttgacgctttctctctgcacacatactctcccaacgaactgacgcgagtggcttcagccctcagaaaacttggggcgccacccctcagagcgtggaagagccgggcgcgtgcastcagagcgtccctcatctcccgtggagggagagcggccgtctgcggtcgatatctcttcaactgggcggtgaagaccaagctcaaactcactccattgccggaggcgcgccatctggatttatccagttggttcaccgtcggcgccggcgggggcgacatttatcacagcgtgtcgcgtgcccgaccccgcttgttactccttagcctactcctactctttgtaggagtaggccttttcctactccccgctcggtagagcggcacacattagctacactccatagctaactgttccattttttttttttttttttttttttttttttttttttttttttttttttttttttttttttttcttttccttcctttctttttcactttacttcattctttcctggtggctccatcttagccctagtcacggctagctgtgaaaggtccgtgagccgcatgactgcagagagtgccgtaactggtctctytgcagatcatgt

SEQ ID NO: 4 - DNA, 9683 bp, Hepatitis C virus
acccgcccctaataggggcgacactccgccatgaatcactcccctgtgaggaactactgtcttcacgcagaaagcgtctagccatggcgttagtatgagtgtcgtacagcctccaggcccccccctcccgggagagccatagtggtctgcggaaccggtgagtacaccggaattgccgggaagactgggtcctttcttggataaacccactctatgcccggccatttgggcgtgcccccgcaagactgctagccgagtagcgttgggttgcgaaaggccttgtggtactgcctgatagggtgcttgcgagtgccccgggaggtctcgtagaccgtgcatcatgagcacaaatcccaaacctcaaagaaaaaccaacagaaacaccaaccgtcgcccacaagacgtcaagtttccgggcggcggccagatcgttggcggagtatacttgctgccgcgcaggggccccaggttgggtgtgcgcgcggcaaggaaaacttcggagcggtcacagccccgtgggagacgccagcccatccccaaagatcggcgtcccactggcaagtcctggggaaaaccaggatacccttggcccttatatgggaacgaggggctcggctgggcaggatggctcctgtccccccagggctcccgtccctcttggggccccactgacccccggcgtaggtcgcgcaatgtgggtaaggtcatcgacaccctaacgtgcggcttcgccgacctcatggggtacatccccgtcgtaggcgccccgcttggcggtgtcgccagagctctcgcgcatggcgtgagggccctggaggacggggtcaactatgcaacagggaacttacccggttgccccttttctatcttcttgctggccctactgtcctgcatcaccactccggtctcagctgcccaggtgaaaaacaccagtgacatctacatggtgactaacgactgtcccaacagcagcatcacctggcagcttagggccgcagtcctccacgtccccggatgtgtcccgtgtgagaaagtggggaatacatctcagtgctggacgccggtctcacccaatgtggctgtgcagcaacccggcgccctcacgcggggcttgcggacgcacatcgatatcgttgtaatgtccgctacgctctgctccgctctctatgtgggggacctctgcggcggggtaatgctcgcggcccagatattcatcgtctcgccacaacaccactggttcgtgcaagagtgcaattgctccatctaccctggtaccatcactggtcaccgtatggcatgggacatgatgatgaactggtcgcccacagctaccatgatcctggcgtacgcgacacgtgttcccgaggtcatcatagacatcattagcggggctcactggggtgtcatgttcggcctggcctacttctctatgcagggagcgtgggcgaaggtcgttgtcatcctcctgctggccgctggggtggacgcacataccaacgtcattggggcccaggtggggcgcaccgccagtagccttaatagcttgttcaccgtcggcgctaagcagaacatccagctgatcaactccaatggcagttggcacatcaaccgcactgctctgaactgcaatgactctctgaacaccggcttcctcgcgtccctgttctacaccaatcgcttcaactcgtcgggatgcccagaacgtctggcatcctgccgtaggattgaggccttcaggataggatggggcactctgcaatatgagcacaatgtcaccaattcagaggatatgagaccatactgctggcattatccacccaaaccttgtggtatagtccccgcgaggtctgtgtgtggcccggtgtactgtttcacacccagcccagtagtagtgggcacgaccgacaggcgtggagtgcccacttacacgtggggggagaatgagacggacgtcttcctactgaacagcacccggccaccgcgggggtcatggttcggctgtacgtggatgaactccactggcttcaccaagacttgtggcgcaccaccttgccgcattagagctgatttcaatgccagcacggacctgttgtgccccacggactgttttaggaaacaccctgacgccacttacatcaagtgtggctccgggccctggctcacgcccagatgcctggtcgactacccctacaggctctggcactacccctgcacagtcaactatagcatcttcaagataaggatgtacgtggggggggttgaacacaggcttacagctgcctgtaacttcacccgcggggatccttgcaacttggatgacagagacagaagtcaactgtcccccttgttgcactctaccacggagtgggccatcttgccctgcacttactctgacctgcccgccttgtcgaccggtctcctccacctccaccaaaacatcgtggacgtgcaatacatgtacggcctttcaccagccgtcacgaagtacatagtccggtgggagtgggtagtgctcttgttcctgctcttggcggacgccagggtctgtgcctgtgtatggatgctcatcctgctgggccaagccgaggcagccctagagaagctggttgttttgcacgccgcgagtgcggctggctgcaatggctttctatatttcatcatctttttcgtggctgcgtggtgcatcaagggtcgagtggtccccttggctacctattccctcatcggcctatggtccttcttcctactgctcctagcattgcctcaacaggcttatgcttatgatgcaactgtgcatggacaaataggcgtggccctgttggtgctgctcaccctctttacactcaccccggcatataagaccctcctgggccggtgtctgtggtggctgtgctatctcctgaccttgggagaggccctcgtccaggagtgggcaccctccatgcaggcgcgcggtggccgggatggcatcatatgggctgccaccatattctgcccgggtgtggtgtttgacataaccaagtggcttttggcgatacttggacctggttatctcctaagagatgctttgacacgcgtgccgtatttcgtcagagcccacgctctgctgagaatgtgcgccatggtgaagcacctcgtggggggtaagtacgtccagatggcgctattaacccttggtaggtggactggcacttacatctacgaccacctcgcccccatgtcggattgggctgccagcggcctgcgggacctggcggtcgctgtggaacctatcatcttcagtccgatggagaaaaaagtcatcgtatggggagcggagacagccgcgtgcggggacatcttgcacggacttcccgtgtctgctcggcttggtcgagagatccttcttggcccagctgacggctacacctctaaggggtggaagcttcttgcgcctatcactgcttatgcccagcagacacgaggtctcttgggcgccatagtggtgagcatgacaggccgtgacaaaacggaacaggccggggagatccaagtcctgtccacggtcactcagaccttcctcggaactaccatctcaggggtcttatggaccgtctaccacggagctggcaacaagaccttagccggttcgcggggcccggtcacgcagatgtactccagtgccgagggagacttggtggggtggcccagtccccccgggaccaaatccatggagccgtgcacatgcggagcggtcgacctgtatctggtcacgcggaacgctgatgtcatcccggctcggagacgcggggacaagcggggagcgttgctctccccgagacctctctcgaccttgaaggggtcctcagggggaccggtgctttgccccaggggccacgttgttgggatcttccgggcagccatatgctctcggggcgtggccaagtccatagacttcatccccgttgagatgcttgacatcgtcacgcgctcccccacctttaccgacaacagcacgccaccggctgtgccccggacctatcaggttggatacctgcacgccccaaccggcagcgggaagagcaccaaggtccctgttgcatacgccgcccaggggtacaaagtactagtgctgaatccctcggtggcggccaccctggggttcggggcatacttggccaaggcacatggcatcaatcccaatattaggactggagtcaggactgtgacgactggggaggccatcacgtactccacgtatggcaagttcctcgccgatgggggctgtgcaggcggcgcctatgacatcatcatatgcgatgaatgccacgccacggacgctaccacccttctcggcatcggaacagttcttgaccaagcagaatcagctggggtcaggctaaccgtactggccacggccacgcctcccgggtcgataacaacccctcatcccaatatagaggaggtggccctcggacaggagggcgagatccccttctatgggaaggcgatccccctggctcacatcaagggagggaggcatttgatcttctgccactcaaagaagaagtgtgacgagctcgcggcggccctccgggccatgggcttgaacgctgtggcatactacagagggttggacgtctccataataccagctcaaggagacgtggtggttgtcgccactgacgccctcatgacagggtacactggagactttgactccgtgattgactgcaacgtagcggttactcaagtcgtggacttcagcttggaccccaccttcaccatatccacacaaaccgtcccccaagacgccgtctcacgcagccagcgccgggggcgcacgggcagagggagactgggcatttacaggtacgtttccactggtgagcgagcttcgggaatgtttgacagcgtaacgctctgcgagtgctacgatgcaggggctgcatggtatgatctcacaccagcggaaaccaccgtcaggcttagggcgtatttcaacacgcccggcctgcccgtgtgccaagaccacctcgagttttgggaggcagttttcaccggcctcacacacatagatgcccactacctttcccaaacaaagcaagcgggggagaatttcgcatacctgacagcctatcaggccacagtgtgtgccagagccaaagcccctcccccgtcttgggacgtcatgtggaagtgcctgactcgactcaaacccacgctcgtgggccccacacctctcctgtaccgcctgggttcagttaccaacgatgtcaccttcacacaccctgtgacaaagtacatcgctacttgcatgcaagctgacctcgaggtcatgaccagcacgtgggtcctagccgggggagtcctggctgccatcgccgcgtactgcttggcgactgggtgtgtttccatcatcggccgtttgcacgtcaaccagcgaaccgtcgttgcacctgacaaggaggtcctctatgaggcttttgacgagatggaggagtgtgcttccagagcggccctcattgaggaggcgcaacggatagccgagatgctgaagtctaagatccaaggcttattgcagcaggcttccaagcaggcccaggacatacaaccaaccgtgcaggcttcatggcccaaggtggagcaattctgggccaaacacatgtggaacttcattagcggcatccaatatcttgcgggactgtcaacgctgccagggaaccccgctgtggcctctatgatggcattcagtgccgccatcaccagtccgctgtcgactagcaccaccatccttctcaacatcatgggaggctggctggcgtctcaaattgcgccacccgcaggggccacaggcttcgtggtcagtggcctggtgggggctgccataggcagcgtaggcttgggtaaggtgctggtggacatcttggcagggtacggtgcgggcatttcgggggctctcgtcgcattcaagatcatgtctggcgagaagccctccatggaggatgtcatcaacctgctgcccggaatcctgtccccgggcgccctggtggtgggggtcatttgcgcggccattctgcgccgtcatgtgggaccgggggaaggtgcggtccaatggatgaataggcttattgcctttgcttccagaggaaaccacgtcgcccccacccactatgtgacggagtcagatgcgtcgcagcgcgtgacccaactacttggctctctcaccataactagcctgcttagaaggctccacaattggattactgaggactgccccaccccatgcaatggctcatggctccgcgatgtgtgggactgggtgtgcaccatcctgactgactttaaaaactggctgacctccaagttgttcccaaagctgcccggcctccccttcatctcttgccaaaaggggtataggggcgactgggccggcacgggcatcatggtcacgcggtgcccttgtggcgccaacatttctggcaatgtccgcttcggctctatgagaatcacagggcctaagacctgcatgaacacctggcaggggactttccctatcaactgctacacggagggccaatgcatgccgagacctgcgccaaactttaagaccgccatctggagggtggcggcctcagagtacgcggaggtgacgcggcacgggtcgtactcttacataacagggctgaccgctgacaatctgaaggttccctgccaaataccatctccagagttcttttcctgggtagacggagtacagatccacaggtttgctcccactccaaagccgttctttcgggatgaggtctcgttcagcgtggggctcaactcatttgtagtcgggtctcagcttccctgcgaccctgaacccgacgcggacgtgttgatgtccatgctaacagatcctggccatatcacggcagaggctgcagcgcggcgcttagcgcgggggtcacccccatctgaggcaagctcctcagcaagccagctgtcggccccgtcgctgcgtaccacctgtgccacccacggcacggcctatgatgtggccatggtggatgctaacctgttcatgaagggggaagtgattcggatagagtccgattccaaagtggtcgttctggactctctcgacccactggccgaagaggtgagcgacgtcgaaccctctataccatcagagtacttgatccccaagaaacaattcccaccagccttgccggcctgggcgcggcctgactacaacccaccgcttgtggaatcgtggaggaagcctgactaccaaccacccactgtcgcgggctgtgctctccccccccccaagaagaccccgacgccccccccaaggaagcgtcggacggtgagactcagtgagagcgccgtgggagacatcctccaacagctggctattaagacctttggccagccccctccaagcggaggcccagacccccccacgggggcgggcgccgccggctccggcggtcagacgccccctgatgagccggctccttcggagacggattctgtctcctccatgcccccccttgagggggagcccggagacccagacctggagcttggccaggtagagccccaaccccccccccaggggggggaggcggctcccgactcagactctgggtcgtggtctacctgctccgaggaggaggattccaccgtgtgctgctccatgtcgtactcctggaccggggcccttataactccttgcagccccgaagaggagaagttgccaatcaatcccctgagcaactcattgttgcgctaccacaacaaggtgtactgcactacatcaagaagtgcgtcactgagggccaaaaaggtaacttttgacaggatgcaagtactcgatgcccactatgactcagtcttaaaggacattaagctagcggcctccaaggtcagcgcaaggtccctcagcttggaggaggcgtgcaagctgaccccgccccactctgcgaggtccaaatatggatttggggctaaggaggtccgcagcttgtccgggagggccgtcaaccacatcaagtccgtgtggaaggacctcttggaagactcacaaacaccaatacctacaaccatcatggccaagaatgaggtgttctgcgtgaaccctgctaaggggggcaagaaagcagctcgcctcatcgtttaccccgaccttggtgtcagggtctgcgaaaagatggccctctatgatgttgcacaaaagcttcctcaggcggtgatgggggcctcctatgggttccagtactctcccgcccagcgggtggagtttctcttgaaagcgtgggcggacaagaaagaccctatgggtttttcgtatgatacccgatgctttgactcaactgtcactgagagagacataagaactgaggaggacatatacctgtcctgctccctacccgaggaggcccgcactgccacacactcgctgactgagagactttacgtgggagggcccatgttcaacagcaagggccagacctgcgggtacaggcgttgccgcgctagcggggtgctcaccactagcatggggaataccatcacatgctatgtaaaagccctagcggcctgcaaggccgcagggatagttgcacccacgatgctggtatgcggcgatgacttggttgtcatctcagaaagccaggggactgaggaggacgagcggaacctgagagccttcacggaggctatgaccaggtattctgcccctcctggtgacccccccagaccggaatacgacttggagctgataacatcctgctcctcaaatgtgtctgtggcacttggcccccggggcaaccgcagatactatctgaccagagaccccaccactccaatcgcccgggctgcctgggaaacagtcagacactcccctgtcaattcatggctgggaaacatcatccagtacgctccaaccatatgggttcgtatggtcctgatgacacatttctactccattctcatggcccaagacactctggaccagaaccttaactttgaaatgtatggagctgtgtactctgtaagtcccttggacctcccagccataattgaaaagctccatgggcttgacgctttctctctgcacacatactctcccaacgaactgacgcgagtggcttcagccctcagaaaacttggggcgccacccctcagagcgtggaagagccgggcgcgtgcagtcagagcgtccctcatctcccgtggagggagagcggccgtctgcggtcgatatctcttcaactgggcggtgaagaccaagctcaaactcactccattgccggaggcgcgccatctggatttatccagttggttcaccgtcggcgccggcgggggcgacatttatcacagcgtgtcgcgtgcccgaccccgcttgttactccttagcctactcctactctttgtaggagtaggccttttcctactccccgctcggtagagcggcacacattagctacactccatagctaactgttccattttttttttttttttttttttttttttttttttttttttttttttttttttttttttttttcttttccttcctttctttttcactttacttcattctttcctggtggctccatcttagccctagtcacggctagctgtgaaaggtccgtgagccgcatgactgcagagagtgccgtaactggtctctytgcagatcatgt

SEQ ID NO: 5 - protein, 3034 aa, Hepatitis C virus
MSTNPKPQRKTNRNTNRRPQDVKFPGGGQIVGGVYLLPRRGPRLGVRAARKTSERSQPRGRRQPIPKDRRPTGKSWGKPGYPWPLYGNEGLGWAGWLLSPQGSRPSWGPTDPRRRSRNVGKVIDTLTCGFADLMGYIPVVGAPLGGVARALAHGVRALEDGVNYATGNLPGCPFSIFLLALLSCITTPVSAAQVKNTSDIYMVTNDCPNSSITWQLRAAVLHVPGCVPCEKVGNTSQCWTPVSPNVAVQQPGALTRGLRTHIDIVVMSATLCSALYVGDLCGGVMLADQMFIVSPQHHWFVQECNCSIYPGTITGHRMAWDMMMNWSPTATMILAYATRVPEVIIDIISGAHWGVMFGLAYFSMQGAWAKVVVILLLAAGVDARGTFVIGGQVARTASGLHGLFTAGAQQNIQLINSNGSWHINRTALNCNDSLNTGFLASLFYTNRFNSSGCPERLASCRRIEAFRIGWGHLQYEHNVTNSEDMRPYCWHYPPKPCGIVPARSVCGPVYCFTPSPVVVGTTDRRGVPTYTWGENETDVFLLNSTRPPQGSWFGCTWMNSTGFTKTCGAPPCRIRADFNASTDLLCPTDCFRKHPDATYIKCGSGPWLTPRCLVDYPYRLWHYPCTVNYSIFKIRMYVGGVEHRLTAACNFTRGDPCNLDDRDRSQLSPLLHSTTEWAILPCTYSDLPALSTGLLHLHQNIVDVQYMYGLSPAVTKYIVRWEWVVLLFLLLADARVCACVWMLILLGQAEAALEKLVVLHAASAAGCNGFLYFIIFFVAAWCIKGRVVPLATYSLIGLWSFFLLLLALPQQAYAYDATVHGQIGVALLVLLTLFTLTPAYKTLLGRCLWWLCYLLTLGEALVQEWAPSMQARGGRDGIIWAATIFCPGVVFDITKWLLAILGPGYLLRDALTRVPYFVRAHALLRMCAMVKHLVGGKYVQMALLTLGRWTGTYIYDHLAPMSDWAASGLRDLAVAVEPIIFSPMEKKVIVWGAETAACGDILHGLPVSARLGREILLGPADGYTSKGWKLLAPITAYAQQTRGLLGAIVVSMTGRDKTEQAGEIQVLSTVTQTFLGTTISGVLWTVYHGAGNKTLAGSRGPVTQMYSSAEGDLVGWPSPPGTKSMEPCTCGAVDLYLVTRNADVIPARRRGDKRGALLSPRPLSTLKGSSGGPVLCPRGHVVGIFRAAICSRGVAKSIDFIPVEAIDIVTRSPTFTDNSTPPAVPQTYQVGYLHAPTGSGKSTKVPVAYAAQGYKVLVLNPSVAATLGFGAYLAKAHGINPNIRTGVRTVTTGEAITYSTYGKFLADGGCAGGAYDIIICDECHATDATTLLGIGTVLDQAESAGVRLTVLATATPPGSITTPHPNIEEVALGQEGEIPFYGRAIPLAHIKGGRHLIFCHSKKKCDELAAALRAMGLNAVAYYRGLDVSIIPAQGDVVVVATDALMTGYTGDFDSVIDCNVAVTQVVDFSLDPTFTISTQTVPQDAVSRSQRRGRTGRGRLGIYRYVSTGERASGMFDSVTLCECYDAGAAWYDLTPAETTVRLRAYFNTPGLPVCQDHLEFWEAVFTGLTHIDAHYLSQTKQAGENFAYLTAYQATVCARAKAPPPSWDVMWKCLTRLKPTLVGPTPLLYRLGSVTNDVTFTHPVTKYIATCMQADLEVMTSTWVLAGGVLAAIAAYCLATGCVSIIGRLHVNQRTVVAPDKEVLYEAFDEMEECASRAALIEEAQRIAEMLKSKIQGLLQQASKQAQDIQPTVQASWPKVEQFWAKHMWNFISGIQYLAGLSTLPGNPAVASMMAFSAAITSPLSTSTTILLNIMGGWLASQIAPPAGATGFVVSGLVGAAIGSVGLGKVLVDILAGYGAGISGALVAFKIMSGEKPSMEDVINLLPGILSPGALVVGVICAAILRRHVGPGEGAVQWMNRLIAFASRGNHVAPTHYVTESDASQRVTQLLGSLTITSLLRRLHNWITEDCPTPCNGSWLRDVWDWVCTILTDFKNWLTSKLFPKLPGLPFISCQKGYRGDWAGTGIMVTRCPCGANISGNVRFGSMRITGPKTCMNTWQGTFPINCYTEGQCMPRPAPNFKTAIWRVAASEYAEVTRHGSYSYITGLTADNLKVPCQIPSPEFFSWVDGVQIHRFAPTPKPFFRDEVSFSVGLNSFVVGSQLPCDPEPDADVLMSMLTDPGHITAEAAARRLARGSPPSEASSSASQLSAPSLRATCATHGTAYDVAMVDANLFMKGEVIRIESDSKVVVLDSLDPLAEEVSDVEPSIPSEYLIPKKQFPPALPAWARPDYNPPLVESWRKPDYQPPTVAGCALPPPKKTPTPPPRKRRTVRLSESAVGNILQQLAIKTFGQPPPSGGPDPPTGAGAAGSGGQTPPDEPGPLETDFVSSMPPLEGEPGDPDLEVGQVKPQPPPQGGEAAPDSDSGSWSTCSEEEDSAVCCSMSYSWTGALITPCSPEEEKLPINPLSNSLLRYHNKVYCTTSRSASLRAKKVTFDRMQVLDAHYDSVLKDIKLAASKVSARSLSLEEACKLTPPHSARSKYGFGAKEVRSLSGRAVNHIKSVWKDLLEDSQTPIPTTIMAKNEVFCVNPAKGGKKAARLIVYPDLGVRVCEKMALYDVAQKLPQAVMGASYGFQYSPAQRVEFLLKAWADKKDPMGFSYDTRCFDSTVTERDIRTEEDIYLSCSLPEEARTAIHSLTERLYVGGPMFNSKGQTCGYRRCRASGVLTTSMGNTITCYVKALAACKAAGIVAPTMLVCGDDLVVISESQGTEEDERNLRAFTEAMTRYSAPPGDPPRPEYDLELITSCSSNVSVALGPRGNRRYYLTRDPTTPIARAAWETVRHSPVNSWLGNIIQYAPTIWVRMVLMTHFYSILMAQDTLDQNLNFEMYGAVYSVSPLDLPAIIEKLHGLDAFSLHTYSPNELTRVASALRKLGAPPLRAWKSRARAVRASLISRGGRAAVCGRYLFNWAVKTKLKLTPLPEARHLDLSSWFTVGAGGGDIYHSVSRARPRLLLLSLLLLFVGVGLFLLPAR

SEQ ID NO: 6 - protein, 3034 aa, Hepatitis C virus
MSTNPKPQRKTNRNTNRRPQDVKFPGGGQIVGGVYLLPRRGPRLGVRAARKTSERSQPRGRRQPIPKDRRPTGKSWGKPGYPWPLYGSEGLGWAGWLLSPQGSRPSWGPTDPRRRSRNVGKVIDTLTCGFADLMGYIPVVGAPLGGVARALAHGVRALEDGVNYATGNLPGCPFSIFLLALLSCITTPVSAAQVKNTSDIYMVTNDCPNSSITWQLRAAVLHVPGCVPCEKVGNTSQCWTPVSPNVAVQQPGALTRGLRTHIDIVVMSATLCSALYVGDLCGGVMLAAQMFIVSPQHHWFVQECNCSIYPGTITGHRMAWDMMMNWSPTATMILAYATRVPEVIIDIISGAHWGVMFGLAYFSMQGAWAKVVVILLLAAGVDARGTFLIGGQVARTANGLHGLFTAGAQQNIQLINSNGSWHINRTALNCNDSLNTGFLASLFYTNRFNSSGCPERLASCRRIEAFRIGWGTLQYEHNVTNSEDMRPYCWHYPPKPCGIVPARSVCGPVYCFTPSPVVVGTTDRRGVPTYTWGENETDVFLLNSTRPPQGSWFGCTWMNSTGFTKTCGAPPCRIRADFNASTDLLCPTDCFRKHPDATYIKCGSGPWLTPRCLVDYPYRLWHYPCTVNYSIFKIRMYVGGVEHRLTAACNFTRGDPCNLDDRDRSQLSPLLHSTTEWAILPCTYSDLPALSTGLLHLHQNIVDVQYMYGLSPAVTKYIVRWEWVVLLFLLLADARVCACVWMLILLGQAEAALEKLVVLHAASAAGCNGFLYFIIFFVAAWCIKGRVVPLATYSLIGLWSFFLLLLALPQQAYAYDATVHGQIGVALLVLLTLFTLTPAYKTLLGRCLWWLCYLLTLGEALVQEWAPSMQARGGRDGIIWAATIFCPGVVFDITKWLLAILGPGYLLRDALTRVPYFVRAHALLRMCAMVKHLVGGKYVQMALLTLGRWTGTYIYDHLAPMSDWAASGLRDLAVAVEPIIFSPMEKKVIVWGAETAACGDILHGLPVSARLGREILLGPADGYTSKGWKLLAPITAYAQQTRGLLGAIVVSMTGRDKTEQAGEIQVLSTVTQTFLGTTISGVLWTVYHGAGNKTLAGSRGPVTQMYSSAEGDLVGWPSPPGTKSMEPCTCGAVDLYLVTRNADVIPARRRGDKRGALLSPRPLSTLKGSSGGPVLCPRGHVVGIFRAAICSRGVAKSIDFIPVEMLDIVTRSPTFTDNSTPPAVPQTYQVGYLHAPTGSGKSTKVPVAYAAQGYKVLVLNPSVAATLGFGAYLAKAHGINPNIRTGVRTVTTGEAITYSTYGKFLADGGCAGGAYDIIICDECHATDATTLLGIGTVLDQAESAGVRLTVLATATPPGSITTPHPNIEEVALGQEGEIPFYGRAIPLAHIKGGRHLIFCHSKKKCDELAAALRAMGLNAVAYYRGLDVSIIPAQGDVVVVATDALMTGYTGDFDSVIDCNVAVTQVVDFSLDPTFTISTQTVPQDAVSRSQRRGRTGRGRLGIYRYVSTGERASGMFDSVTLCECYDAGAAWYDLTPAETTVRLRAYFNTPGLPVCQDHLEFWEAVFTGLTHIDAHYLSQTKQAGENFAYLTAYQATVCARAKAPPPSWDVMWKCLTRLKPTLVGPTPLLYRLGSVTNDVTFTHPVTKYIATCMQADLEVMTSTWVLAGGVLAAIAAYCLATGCVSIIGRLHVNQRTVVAPDKEVLYEAFDEMEECASRAALIEEAQRIAEMLKSKIQGLLQQASKQAQDIQPTVQASWPKVEQFWAKHMWNFISGIQYLAGLSTLPGNPAVASMMAFSAAITSPLSTSTTILLNIMGGWLASQIAPPAGATGFVVSGLVGAAIGSVGLGKVLVDILAGYGAGISGALVAFKIMSGEKPSMEDVINLLPGILSPGALVVGVICAAILRRHVGPGEGAVQWMNRLIAFASRGNHVAPTHYVTESDASQRVTQLLGSLTITSLLRRLHNWITEDCPTPCNGSWLRDVWDWVCTILTDFKNWLTSKLFPKLPGLPFISCQKGYRGDWAGTGIMVTRCPCGANISGNVRFGSMRITGPKTCMNTWQGTFPINCYTEGQCMPRPAPNFKTAIWRVAASEYAEVTRHGSYSYITGLTADNLKVPCQIPSPEFFSWVDGVQIHRFAPTPKPFFRDEVSFSVGLNSFVVGSQLPCDPEPDADVLMSMLTDPGHITAEAAARRLARGSPPSEASSSASQLSAPSLRATCATHGTAYDVAMVDANLFMKGEVIRIESDSKVVVLDSLDPLAEEVSDVEPSIPSEYLIPKKQFPPALPAWARPDYNPPLVESWRKPDYQPPTVAGCALPPPKKTPTPPPRKRRTVRLSESAVGNILQQLAIKTFGQPPPSGGPDPPTGAGAAGSGGQTPPDEPVLLETDFVSSMPPLEGEPGDPNLEVGQVKPQPPPQGGEAAPDSDSGSWSTCSEEEDSTVCCSMSYSWTGALITPCSPEEEKLPINPLSNSLLRYHNKVYCTTSRSASLRAKKVTFDRMQVLDAHYDSVLKDIKLAASKVSARSLSLEEACKLTPPHSARSKYGFGAKEVRSLSGRAVNHIKSVWKDLLEDSQTPIPTTIMAKNEVFCVNPAKGGKKAARLIVYPDLGVRVCEKMALYDVAQKLPQAVMGASYGFQYSPAQRVEFLLKAWADKKDPMGFSYDTRCFDSTVTERDIRTEEDIYLSCSLPEEARTAIHSLTERLYVGGPMFNSKGQTCGYRRCRASGVLTTSMGNTITCYVKALAACKAAGIVAPTMLVCGDDLVVISESQGTEEDERNLRAFTEAMTRYSAPPGDPPRPEYDLELITSCSSNVSVALGPRGNRRYYLTRDPTTPIARAAWETVRHSPVNSWLGNIIQYAPTIWVRMVLMTHFYSILMAQDTLDQNLNFEMYGAVYSVSPLDLPAIIEKLHGLDAFSLHTYSPNELTRVASALRKLGAPPLRAWKSRARAVRASLISRGGRAAVCGRYLFNWAVKTKLKLTPLPEARHLDLSSWFTVGAGGGDIYHSVSRARPRLLLLSLLLLFVGVGLFLLPAR

SEQ ID NO: 7 - DNA, 2439 bp, Hepatitis C virus
atgagcacaaatcctaaacctcaaagaaaaaccaaaagaaacaccaaccgtcgcccacaagacgttaagtttccgggcggcggccagatcgttggcggagtatacttgttgccgcgcaggggccccaggttgggtgtgcgcgcgacaaggaagacttcggagcggtcccagccacgtggaaggcgccagcccatccctaaagatcggcgctccactggcaaatcctggggaaaaccaggatacccctggcccctatacgggaatgagggactcggctgggcaggatggctcctgtccccccgaggttcccgtccctcttggggccccaatgacccccggcataggtcgcgcaacgtgggtaaggtcatcgataccctaacgtgcggctttgccgacctcatggggtacatccctgtcgtgggcgccccgctcggcggcgtcgccagagctctcgcgcatggcgtgagagtcctggaggacggggttaattttgcaacagggaacttacccggttgctccttttctatcttcttgctggccctgctgtcctgcatcaccaccccggtctccgctgccgaagtgaagaacatcagtaccggctacatggtgactaacgactgcaccaatgacagcattacctggcagctccaggctgctgtcctccacgtccccgggtgcgtcccgtgcgagaaagtggggaatgcatctcagtgctggataccggtctcaccgaatgtggccgtgcagcggcccggcgccctcacgcagggcttgcggacgcacatcgacatggttgtgatgtccgccacgctctgctctgccctctacgtgggggacctctgcggtggggtgatgctcgcagcccaaatgttcattgtctcgccgcagcaccactggtttgtccaagactgcaattgctccatctaccctggtaccatcactggacaccgcatggcatgggacatgatgatgaactggtcgcccacggctaccatgatcttggcgtacgcgatgcgtgtccccgaggtcattatagacatcattagcggggctcattggggcgtcatgttcggcttggcctacttctctatgcagggagcgtgggcgaaagtcgttgtcatccttctgttggccgccggggtggacgcgcgcacccatactgttgggggttctgccgcgcagaccaccgggcgcctcaccagcttatttgacatgggccccaggcagaaaatccagctcgttaacaccaatggcagctggcacatcaaccgcaccgccctgaactgcaatgactccttgcacaccggctttatcgcgtctctgttctacacccacagcttcaactcgtcaggatgtcccgaacgcatgtccgcctgccgcagtatcgaggccttccgggtgggatggggcgccttgcaatatgaggataatgtcaccaatccagaggatatgagaccctattgctggcactacccaccaaggcagtgtggcgtggtctccgcgaagactgtgtgtggcccagtgtactgtttcacccccagcccagtggtagtgggcacgaccgacaggcttggagcgcccacttacacgtggggggagaatgagacagatgtcttcctattgaacagcactcgaccaccgctggggtcatggttcggctgcacgtggatgaactcttctggctacaccaagacttgcggcgcaccaccctgccgtactagagctgacttcaacgccagcacggacctgttgtgccccacggactgttttaggaagcatcctgataccacttacctcaaatgcggctctgggccctggctcacgccaaggtgcctgatcgactacccctacaggctctggcattacccctgcacagttaactataccatcttcaaaataaggatgtatgtgggaggggttgagcacaggctcacggctgcatgcaatttcactcgtggggatcgttgcaacttggaggacagagacagaagtcaactgtctcctttgttgcactccaccacggaatgggccattttaccttgctcttactcggacctgcccgccttgtcgactggtcttctccacctccaccaaaacatcgtggacgtacaattcatgtatggcctatcacctgccctcacaaaatacatcgtccgatgggagtgggtaatactcttattcctgctcttagcggacgccagggtttgcgcctgcttatggatgctcatcttgttgggccaggccgaagcagcactagagaagctggtcatcttgcacgctgcgagcgcagctagctgcaatggcttcctatattttgtcatctttttcgtggctgcttggtacatcaagggtcgggtagtccccttagctacctattccctcactggcctgtggtcctttagcctactgctcctagcattgccccaacaggcttatgct

SEQ ID NO: 8 - DNA, 340 bp, Hepatitis C virus
acctgcccctaataggggcgacactccgccatgaatcactcccctgtgaggaactactgtcttcacgcagaaagcgcctagccatggcgttagtatgagtgtcgtacagcctccaggcccccccctcccgggagagccatagtggtctgcggaaccggtgagtacaccggaattgccgggaagactgggtcctttcttggataaacccactctatgcccggccatttgggcgtgcccccgcaagactgctagccgagtagcgttgggttgcgaaaggccttgtggtactgcctgatagggtgcttgcgagtgccccgggaggtctcgtagaccgtgcacc

SEQ ID NO: 9 - DNA, 651 bp, Hepatitis C virus
tatgacgcatctgtgcatggccagataggagcggctctgctggtaatgatcaccctcttcacactcaccccggggtataagaccctcctcggccagtgtctgtggtggttgtgctatctcctgaccctgggggaagccatgattcaggagtgggtaccacccatgcaggtgcgcggcggccgcgatggcatcgcgtgggccgtcactatattctgcccgggtgtggtgtttgacattaccaaatggcttttggcgttgcttgggcctgcttacctcttaagggccgctttgacacatgtgccgtacttcgtcagagctcacgctctgataagggtatgcgctttggtgaagcagctcgcggggggtaggtatgttcaggtggcgctattggcccttggcaggtggactggcacctacatctatgaccacctcacacctatgtcggactgggccgctagcggcctgcgcgacttagcggtcgccgtggaacccatcatcttcagtccgatggagaagaaggtcatcgtctggggagcggagacggctgcatgtggggacattctacatggacttcccgtgtccgcccgactcggccaggagatcctcctcggcccagctgatggctacacctccaaggggtggaagctcctt

SEQ ID NO: 10 - DNA, 6253 bp, Hepatitis C virus
gcgcctatcactgcttatgcccagcagacacgaggcctattgggcgccatagtggtgagcatgacgggccgtgacaagacagaacaggccggggagatccaggtcctctccacagtcactcaaaccttcctcgggactaccatctcaggagtcttgtggaccgtctaccacggggctggcaacaagaccctagccggctcgcggggcccggtcacacagatgtactccagcgccgagggagacttggtagggtggcccagtcctcccgggactaaatccatggagccgtgcacgtgcggagcggtcgacctgtacctggtcacgcggaacgctgacgtcatcccggctcggagacgcggggacaagcggggagcgttgctctccccgagacctctctcaactctgaaggggtcttcggggggaccggtgctctgccccaggggccacgttgtcgggatcttccgggcagccatatgctcgcggggcgtggccaagtccatagatttcatccccgttgaggcaattgacatcgtcacgcgctcccccacctttactgacaacagcacgccaccggctgtgccccagacctatcaggttggatacttgcacgccccgactggcagcgggaagagcaccaaagtccctgtcgcatatgccgcccaggggtataaggtgctagtgctcaatccctcggtggccgccaccttggggtttggggcgtacttggccaaggcgcacggcatcaatcctaacattaggactggagtcaggactgtgacgaccggggaggctattacgtattccacgtatggcaagtttctcgctgatgggggctgcgcaggcggcgcctatgacatcatcatatgcgatgagtgccatgccacggatgctaccacccttctcggcatcggaacagttcttgaccaagcagagtcagctggggtcaggctaactgtgctggccacggctacgcctcccggatcaataacaacccctcaccccaacatagaggaggtagctctcggacaggagggtgagatccccttctatgggagagcgatccccctggcccacatcaagggagggaggcacctgatcttctgccactcgaagaaaaagtgtgacgagctcgcggcggccctccgggccatgggcttgaacgctgtggcatactacagagggttggacgtctccataataccagctcaaggagacgtggtggttgtcgccactgacgccctcatgacagggtacactggagactttgactccgtgattgactgcaacgtagcggttactcaagtcgtggacttcagcttggaccccaccttcaccatatccacacaaaccgtcccccaagacgccgtctcacgcagccagcgccgggggcgcacgggcagagggagactgggcatttacaggtacgtttccactggtgagcgagcttcgggaatgtttgacagcgtaacgctctgcgagtgctacgatgcaggggctgcatggtatgatctcacaccagcggaaaccaccgtcaggcttagggcgtatttcaacacgcccggcctgcccgtgtgccaagaccacctcgagttttgggaggcagttttcaccggcctcacacacatagatgcccactacctttcccaaacaaagcaagcgggggagaatttcgcatacctgacagcctatcaggccacagtgtgtgccagagccaaagcccctcccccgtcttgggacgtcatgtggaagtgcctgactcgactcaaacccacgctcgtgggccccacacctctcctgtaccgcctgggttcagttaccaacgatgtcaccttcacacaccctgtgacaaagtacatcgctacttgcatgcaagctgacctcgaggtcatgaccagcacgtgggtcctagccgggggagtcctggctgccatcgccgcgtactgcttggcgactgggtgtgtttccatcatcggccgtttgcacgtcaaccagcgaaccgtcgttgcacctgacaaggaggtcctctatgaggcttttgacgagatggaggagtgtgcttccagagcggccctcattgaggaggcgcaacggatagccgagatgctgaagtctaagatccaaggcttattgcagcaggcttccaagcaggcccaggacatacaaccaaccgtgcaggcttcatggcccaaggtggagcaattctgggccaaacacatgtggaacttcattagcggcatccaatatcttgcgggactgtcaacgctgccagggaaccccgctgtggcctctatgatggcattcagtgccgccatcaccagtccgctgtcgactagcaccaccatccttctcaacatcatgggaggctggctggcgtctcaaattgcgccacccgcaggggccacaggcttcgtggtcagtggcctggtgggggctgccataggcagcgtaggcttgggtaaggtgctggtggacatcttggcagggtacggtgcgggcatttcgggggctctcgtcgcattcaagatcatgtctggcgagaagccctccatggaggatgtcatcaacctgctgcccggaatcctgtccccgggcgccctggtggtgggggtcatttgcgcggccattctgcgccgtcatgtgggaccgggggaaggtgcggtccaatggatgaataggcttattgcctttgcttccagaggaaaccacgtcgcccccacccactatgtgacggagtcagatgcgtcgcagcgcgtgacccaactacttggctctctcaccataactagcctgcttagaaggctccacaattggattactgaggactgccccaccccatgcaatggctcatggctccgcgatgtgtgggactgggtgtgcaccatcctgactgactttaaaaactggctgacctccaagttgttcccaaagctgcccggcctccccttcatctcttgccaaaaggggtataggggcgactgggccggcacgggcatcatggtcacgcggtgcccttgtggcgccaacatttctggcaatgtccgcttcggctctatgagaatcacagggcctaagacctgcatgaacacctggcaggggactttccctatcaactgctacacggagggccaatgcatgccgagacctgcgccaaactttaagaccgccatctggagggtggcggcctcagagtacgcggaggtgacgcggcacgggtcgtactcttacataacagggctgaccgctgacaatctgaaggttccctgccaaataccatctccagagttcttttcctgggtagacggagtacagatccacaggtttgctcccactccaaagccgttctttcgggatgaggtctcgttcagcgtggggctcaactcatttgtagtcgggtctcagcttccctgcgaccctgaacccgacgcggacgtgttgatgtccatgctaacagatcctggccatatcacggcagaggctgcagcgcggcgcttagcgcgggggtcacccccatctgaggcaagctcctcagcaagccagctgtcggccccgtcgctgcgtgccacctgtgccacccacggcacggcctatgatgtggccatggtggatgctaacctgttcatgaagggggaagtgattcggatagagtccgattccaaagtggtcgttctggactctctcgacccactggccgaagaggtgagcgacgtcgaaccctctataccatcagagtacttgatccccaagaaacaattcccaccagccttgccggcctgggcgcggcctgactacaacccaccgcttgtggaatcgtggaggaagcctgactaccaaccacccactgtcgcgggctgtgctctccccccccccaagaagaccccgacgccccccccaaggaagcgtcggacggtgagactcagtgagagcgccgtgggagacatcctccaacagctggctattaagacctttggccagccccctccaagcggaggcccagacccccccacgggggcgggcgccgccggctccggcggtcagacgccccctgatgagccggctccttcggagacggattctgtctcctccatgcccccccttgagggggagcccggagacccagacctggagcttggccaggtagagccccaaccccccccccaggggggggaggcggctcccgactcagactctgggtcgtggtctacctgctccgaggaggaggattccaccgtgtgctgctccatgtcatactcctggaccggggcccttataactccttgcagccccgaagaggagaagttgccaatcaatcccctgagcaactcattgttgcgctaccacaacaaggtgtactgcactacatcaagaagtgcgtcactgagggccaaaaaggtaacttttgacaggatgcaagtactcgatgcccactatgactcagtcttaaaggacattaagctagcggcctccaaggtcagcgcaaggtccctcagcttggaggaggcgtgcaagctgaccccgccccactctgcgaggtccaaatatggatttggggctaaggaggtccgcagcttgtccgggagggccgtcaaccacatcaagtccgtgtggaaggacctcttggaagactcacaaacaccaatacctacaaccatcatggccaagaatgaggtgttctgcgtgaaccctgctaaggggggcaagaaagcagctcgcctcatcgtttaccccgaccttggtgtcagggtctgcgaaaagatggccctctatgatgttgcacaaaagcttcctcaggcggtgatgggggcctcctatgggttccagtactctcccgcccagcgggtggagtttctcttgaaagcgtgggcggacaagaaagaccctatgggtttttcgtatgatacccgatgctttgactcaactgtcactgagagagacataagaactgaggaggacatatacctgtcctgctccctacccgaggaggcccgcactgccacacactcgctgactgagagactttacgtgggagggcccatgttcaacagcaagggccagacctgcgggtacaggcgttgccgcgctagcggggtgctcaccactagcatggggaataccatcacatgctatgtaaaagccctagcggcctgcaaggccgcagggatagttgcacccacgatgctggtatgcggcgatgacttggttgtcatctcagaaagccaggggactgaggaggacgagcggaacctgagagccttcacggaggctatgaccaggtattctgcccctcctggtgacccccccagaccggaatacgacttggagctgataacatcctgctcctcaaatgtgtctgtggcacttggcccccggggcaaccgcagatactatctgaccagagaccccaccactccaatcgcccgggctgcctgggaaacagtcagacactcccctgtcaattcatggctgggaaacatcatccagtacgctccaaccatatgggttcgtatggtcctgatgacacatttctactccattctcatggcccaagacactctggaccagaaccttaactttgaaatgtatggagctgtgtactctgtaagtcccttggacctcccagccataattgaaaagctccatgggcttgacgctttctctctgcacacatactctcccaacgaactgacgcgagtggcttcagccctcagaaaacttggggcgccacccctcagagcgtggaagagccgggcgcgtgcagtcagagcgtccctcatctcccgtggagggagagcggccgtctgcggtcgatatctcttcaactgggcggtgaagaccaagctcaaactcactccattgccggaggcgcgccatctggatttatccagttggttcaccgtcggcgccggcgggggcgacatttatcacagcgtgtcgcgtgcccgaccccgcttgttactccttagcctactcctactctttgtaggagtaggccttttcctactccccgctcggtagagcggcacacattagctacactccatagctaactgttccattttttttttttttttttttttttttttttttttttttttttttttttttttttttttttttcttttccttcctttctttttcactttacttcattctttcctggtggctccatcttagccctagtcacggctagctgtgaaaggtccgtgagccgcatgactgcagagagtgccgtaactggtctctctgcagatcatgt

SEQ ID NO: 11 - DNA, 9530 bp, Artificial Sequence
  synthetic DNA
accggtgagtacaccggaattgccgggaagactgggtcctttcttggataaacccactctatgcccggccatttgggcgtgcccccgcaagactgctagccgagtagcgttgggttgcgaaaggccttgtggtactgcctgatagggtgcttgcgagtgccccgggaggtctcgtagaccgtgcaccatgagcacaaatcctaaacctcaaagaaaaaccaaaagaaacaccaaccgtcgcccacaagacgttaagtttccgggcggcggccagatcgttggcggagtatacttgttgccgcgcaggggccccaggttgggtgtgcgcgcgacaaggaagacttcggagcggtcccagccacgtggaaggcgccagcccatccctaaagatcggcgctccactggcaaatcctggggaaaaccaggatacccctggcccctatacgggaatgagggactcggctgggcaggatggctcctgtccccccgaggttcccgtccctcttggggccccaatgacccccggcataggtcgcgcaacgtgggtaaggtcatcgataccctaacgtgcggctttgccgacctcatggggtacatccctgtcgtgggcgccccgctcggcggcgtcgccagagctctcgcgcatggcgtgagagtcctggaggacggggttaattttgcaacagggaacttacccggttgctccttttctatcttcttgctggccctgctgtcctgcatcaccaccccggtctccgctgccgaagtgaagaacatcagtaccggctacatggtgactaacgactgcaccaatgacagcattacctggcagctccaggctgctgtcctccacgtccccgggtgcgtcccgtgcgagaaagtggggaatgcatctcagtgctggataccggtctcaccgaatgtggccgtgcagcggcccggcgccctcacgcagggcttgcggacgcacatcgacatggttgtgatgtccgccacgctctgctctgccctctacgtgggggacctctgcggtggggtgatgctcgcagcccaaatgttcattgtctcgccgcagcaccactggtttgtccaagactgcaattgctccatctaccctggtaccatcactggacaccgcatggcatgggacatgatgatgaactggtcgcccacggctaccatgatcttggcgtacgcgatgcgtgtccccgaggtcattatagacatcattagcggggctcattggggcgtcatgttcggcttggcctacttctctatgcagggagcgtgggcgaaagtcgttgtcatccttctgttggccgccggggtggacgcgcgcacccatactgttgggggttctgccgcgcagaccaccgggcgcctcaccagcttatttgacatgggccccaggcagaaaatccagctcgttaacaccaatggcagctggcacatcaaccgcaccgccctgaactgcaatgactccttgcacaccggctttatcgcgtctctgttctacacccacagcttcaactcgtcaggatgtcccgaacgcatgtccgcctgccgcagtatcgaggccttccgggtgggatggggcgccttgcaatatgaggataatgtcaccaatccagaggatatgagaccctattgctggcactacccaccaaggcagtgtggcgtggtctccgcgaagactgtgtgtggcccagtgtactgtttcacccccagcccagtggtagtgggcacgaccgacaggcttggagcgcccacttacacgtggggggagaatgagacagatgtcttcctattgaacagcactcgaccaccgctggggtcatggttcggctgcacgtggatgaactcttctggctacaccaagacttgcggcgcaccaccctgccgtactagagctgacttcaacgccagcacggacctgttgtgccccacggactgttttaggaagcatcctgataccacttacctcaaatgcggctctgggccctggctcacgccaaggtgcctgatcgactacccctacaggctctggcattacccctgcacagttaactataccatcttcaaaataaggatgtatgtgggaggggttgagcacaggctcacggctgcatgcaatttcactcgtggggatcgttgcaacttggaggacagagacagaagtcaactgtctcctttgttgcactccaccacggaatgggccattttaccttgctcttactcggacctgcccgccttgtcgactggtcttctccacctccaccaaaacatcgtggacgtacaattcatgtatggcctatcacctgccctcacaaaatacatcgtccgatgggagtgggtaatactcttattcctgctcttagcggacgccagggtttgcgcctgcttatggatgctcatcttgttgggccaggccgaagcagcactagagaagctggtcatcttgcacgctgcgagcgcagctagctgcaatggcttcctatattttgtcatctttttcgtggctgcttggtacatcaagggtcgggtagtccccttagctacctattccctcactggcctgtggtcctttagcctactgctcctagcattgccccaacaggcttatgcttatgacgcatctgtgcatggccagataggagcggctctgctggtaatgatcaccctcttcacactcaccccggggtataagaccctcctcggccagtgtctgtggtggttgtgctatctcctgaccctgggggaagccatgattcaggagtgggtaccacccatgcaggtgcgcggcggccgcgatggcatcgcgtgggccgtcactatattctgcccgggtgtggtgtttgacattaccaaatggcttttggcgttgcttgggcctgcttacctcttaagggccgctttgacacatgtgccgtacttcgtcagagctcacgctctgataagggtatgcgctttggtgaagcagctcgcggggggtaggtatgttcaggtggcgctattggcccttggcaggtggactggcacctacatctatgaccacctcacacctatgtcggactgggccgctagcggcctgcgcgacttagcggtcgccgtggaacccatcatcttcagtccgatggagaagaaggtcatcgtctggggagcggagacggctgcatgtggggacattctacatggacttcccgtgtccgcccgactcggccaggagatcctcctcggcccagctgatggctacacctccaaggggtggaagctccttgcgcctatcactgcttatgcccagcagacacgaggcctattgggcgccatagtggtgagcatgacgggccgtgacaagacagaacaggccggggagatccaggtcctctccacagtcactcaaaccttcctcgggactaccatctcaggagtcttgtggaccgtctaccacggggctggcaacaagaccctagccggctcgcggggcccggtcacacagatgtactccagcgccgagggagacttggtagggtggcccagtcctcccgggactaaatccatggagccgtgcacgtgcggagcggtcgacctgtacctggtcacgcggaacgctgacgtcatcccggctcggagacgcggggacaagcggggagcgttgctctccccgagacctctctcaactctgaaggggtcttcggggggaccggtgctctgccccaggggccacgttgtcgggatcttccgggcagccatatgctcgcggggcgtggccaagtccatagatttcatccccgttgaggcaattgacatcgtcacgcgctcccccacctttactgacaacagcacgccaccggctgtgccccagacctatcaggttggatacttgcacgccccgactggcagcgggaagagcaccaaagtccctgtcgcatatgccgcccaggggtataaggtgctagtgctcaatccctcggtggccgccaccttggggtttggggcgtacttggccaaggcgcacggcatcaatcctaacattaggactggagtcaggactgtgacgaccggggaggctattacgtattccacgtatggcaagtttctcgctgatgggggctgcgcaggcggcgcctatgacatcatcatatgcgatgagtgccatgccacggatgctaccacccttctcggcatcggaacagttcttgaccaagcagagtcagctggggtcaggctaactgtgctggccacggctacgcctcccggatcaataacaacccctcaccccaacatagaggaggtagctctcggacaggagggtgagatccccttctatgggagagcgatccccctggcccacatcaagggagggaggcacctgatcttctgccactcgaagaaaaagtgtgacgagctcgcggcggccctccgggccatgggcttgaacgctgtggcatactacagagggttggacgtctccataataccagctcaaggagacgtggtggttgtcgccactgacgccctcatgacagggtacactggagactttgactccgtgattgactgcaacgtagcggttactcaagtcgtggacttcagcttggaccccaccttcaccatatccacacaaaccgtcccccaagacgccgtctcacgcagccagcgccgggggcgcacgggcagagggagactgggcatttacaggtacgtttccactggtgagcgagcttcgggaatgtttgacagcgtaacgctctgcgagtgctacgatgcaggggctgcatggtatgatctcacaccagcggaaaccaccgtcaggcttagggcgtatttcaacacgcccggcctgcccgtgtgccaagaccacctcgagttttgggaggcagttttcaccggcctcacacacatagatgcccactacctttcccaaacaaagcaagcgggggagaatttcgcatacctgacagcctatcaggccacagtgtgtgccagagccaaagcccctcccccgtcttgggacgtcatgtggaagtgcctgactcgactcaaacccacgctcgtgggccccacacctctcctgtaccgcctgggttcagttaccaacgatgtcaccttcacacaccctgtgacaaagtacatcgctacttgcatgcaagctgacctcgaggtcatgaccagcacgtgggtcctagccgggggagtcctggctgccatcgccgcgtactgcttggcgactgggtgtgtttccatcatcggccgtttgcacgtcaaccagcgaaccgtcgttgcacctgacaaggaggtcctctatgaggcttttgacgagatggaggagtgtgcttccagagcggccctcattgaggaggcgcaacggatagccgagatgctgaagtctaagatccaaggcttattgcagcaggcttccaagcaggcccaggacatacaaccaaccgtgcaggcttcatggcccaaggtggagcaattctgggccaaacacatgtggaacttcattagcggcatccaatatcttgcgggactgtcaacgctgccagggaaccccgctgtggcctctatgatggcattcagtgccgccatcaccagtccgctgtcgactagcaccaccatccttctcaacatcatgggaggctggctggcgtctcaaattgcgccacccgcaggggccacaggcttcgtggtcagtggcctggtgggggctgccataggcagcgtaggcttgggtaaggtgctggtggacatcttggcagggtacggtgcgggcatttcgggggctctcgtcgcattcaagatcatgtctggcgagaagccctccatggaggatgtcatcaacctgctgcccggaatcctgtccccgggcgccctggtggtgggggtcatttgcgcggccattctgcgccgtcatgtgggaccgggggaaggtgcggtccaatggatgaataggcttattgcctttgcttccagaggaaaccacgtcgcccccacccactatgtgacggagtcagatgcgtcgcagcgcgtgacccaactacttggctctctcaccataactagcctgcttagaaggctccacaattggattactgaggactgccccaccccatgcaatggctcatggctccgcgatgtgtgggactgggtgtgcaccatcctgactgactttaaaaactggctgacctccaagttgttcccaaagctgcccggcctccccttcatctcttgccaaaaggggtataggggcgactgggccggcacgggcatcatggtcacgcggtgcccttgtggcgccaacatttctggcaatgtccgcttcggctctatgagaatcacagggcctaagacctgcatgaacacctggcaggggactttccctatcaactgctacacggagggccaatgcatgccgagacctgcgccaaactttaagaccgccatctggagggtggcggcctcagagtacgcggaggtgacgcggcacgggtcgtactcttacataacagggctgaccgctgacaatctgaaggttccctgccaaataccatctccagagttcttttcctgggtagacggagtacagatccacaggtttgctcccactccaaagccgttctttcgggatgaggtctcgttcagcgtggggctcaactcatttgtagtcgggtctcagcttccctgcgaccctgaacccgacgcggacgtgttgatgtccatgctaacagatcctggccatatcacggcagaggctgcagcgcggcgcttagcgcgggggtcacccccatctgaggcaagctcctcagcaagccagctgtcggccccgtcgctgcgtgccacctgtgccacccacggcacggcctatgatgtggccatggtggatgctaacctgttcatgaagggggaagtgattcggatagagtccgattccaaagtggtcgttctggactctctcgacccactggccgaagaggtgagcgacgtcgaaccctctataccatcagagtacttgatccccaagaaacaattcccaccagccttgccggcctgggcgcggcctgactacaacccaccgcttgtggaatcgtggaggaagcctgactaccaaccacccactgtcgcgggctgtgctctccccccccccaagaagaccccgacgccccccccaaggaagcgtcggacggtgagactcagtgagagcgccgtgggagacatcctccaacagctggctattaagacctttggccagccccctccaagcggaggcccagacccccccacgggggcgggcgccgccggctccggcggtcagacgccccctgatgagccggctccttcggagacggattctgtctcctccatgcccccccttgagggggagcccggagacccagacctggagcttggccaggtagagccccaaccccccccccaggggggggaggcggctcccgactcagactctgggtcgtggtctacctgctccgaggaggaggattccaccgtgtgctgctccatgtcatactcctggaccggggcccttataactccttgcagccccgaagaggagaagttgccaatcaatcccctgagcaactcattgttgcgctaccacaacaaggtgtactgcactacatcaagaagtgcgtcactgagggccaaaaaggtaacttttgacaggatgcaagtactcgatgcccactatgactcagtcttaaaggacattaagctagcggcctccaaggtcagcgcaaggtccctcagcttggaggaggcgtgcaagctgaccccgccccactctgcgaggtccaaatatggatttggggctaaggaggtccgcagcttgtccgggagggccgtcaaccacatcaagtccgtgtggaaggacctcttggaagactcacaaacaccaatacctacaaccatcatggccaagaatgaggtgttctgcgtgaaccctgctaaggggggcaagaaagcagctcgcctcatcgtttaccccgaccttggtgtcagggtctgcgaaaagatggccctctatgatgttgcacaaaagcttcctcaggcggtgatgggggcctcctatgggttccagtactctcccgcccagcgggtggagtttctcttgaaagcgtgggcggacaagaaagaccctatgggtttttcgtatgatacccgatgctttgactcaactgtcactgagagagacataagaactgaggaggacatatacctgtcctgctccctacccgaggaggcccgcactgccacacactcgctgactgagagactttacgtgggagggcccatgttcaacagcaagggccagacctgcgggtacaggcgttgccgcgctagcggggtgctcaccactagcatggggaataccatcacatgctatgtaaaagccctagcggcctgcaaggccgcagggatagttgcacccacgatgctggtatgcggcgatgacttggttgtcatctcagaaagccaggggactgaggaggacgagcggaacctgagagccttcacggaggctatgaccaggtattctgcccctcctggtgacccccccagaccggaatacgacttggagctgataacatcctgctcctcaaatgtgtctgtggcacttggcccccggggcaaccgcagatactatctgaccagagaccccaccactccaatcgcccgggctgcctgggaaacagtcagacactcccctgtcaattcatggctgggaaacatcatccagtacgctccaaccatatgggttcgtatggtcctgatgacacatttctactccattctcatggcccaagacactctggaccagaaccttaactttgaaatgtatggagctgtgtactctgtaagtcccttggacctcccagccataattgaaaagctccatgggcttgacgctttctctctgcacacatactctcccaacgaactgacgcgagtggcttcagccctcagaaaacttggggcgccacccctcagagcgtggaagagccgggcgcgtgcagtcagagcgtccctcatctcccgtggagggagagcggccgtctgcggtcgatatctcttcaactgggcggtgaagaccaagctcaaactcactccattgccggaggcgcgccatctggatttatccagttggttcaccgtcggcgccggcgggggcgacatttatcacagcgtgtcgcgtgcccgaccccgcttgttactccttagcctactcctactctttgtaggagtaggccttttcctactccccgctcggtagagcggcacacattagctacactccatagctaactgttccattttttttttttttttttttttttttttttttttttttttttttttttttttttttttttttcttttccttcctttctttttcactttacttcattctttcctggtggctccatcttagccctagtcacggctagctgtgaaaggtccgtgagccgcatgactgcagagagtgccgtaactggtctctctgcagatcatgt

SEQ ID NO: 12 - DNA, 9530 bp, Artificial Sequence
  synthetic DNA
accggtgagtacaccggaattgccgggaagactgggtcctttcttggataaacccactctatgcccggccatttgggcgtgcccccgcaagactgctagccgagtagcgttgggttgcgaaaggccttgtggtactgcctgatagggtgcttgcgagtgccccgggaggtctcgtagaccgtgcaccatgagcacaaatcctaaacctcaaagaaaaaccaaaagaaacaccaaccgtcgcccacaagacgttaagtttccgggcggcggccagatcgttggcggagtatacttgttgccgcgcaggggccccaggttgggtgtgcgcgcgacaaggaagacttcggagcggtcccagccacgtggaaggcgccagcccatccctaaagatcggcgctccactggcaaatcctggggaaaaccaggatacccctggcccctatacgggaatgagggactcggctgggcaggatggctcctgtccccccgaggttcccgtccctcttggggccccaatgacccccggcataggtcgcgcaacgtgggtaaggtcatcgataccctaacgtgcggctttgccgacctcatggggtacatccctgtcgtgggcgccccgctcggcggcgtcgccagagctctcgcgcatggcgtgagagtcctggaggacggggttaattttgcaacagggaacttacccggttgctccttttctatcttcttgctggccctgctgtcctgcatcaccaccccggtctccgctgccgaagtgaagaacatcagtaccggctacatggtgactaacgactgcaccaatgacagcattacctggcagctccaggctgctgtcctccacgtccccgggtgcgtcccgtgcgagaaagtggggaatgcatctcagtgctggataccggtctcaccgaatgtggccgtgcagcggcccggcgccctcacgcagggcttgcggacgcacatcgacatggttgtgatgtccgccacgctctgctctgccctctacgtgggggacctctgcggtggggtgatgctcgcagcccaaatgttcattgtctcgccgcagcaccactggtttgtccaagactgcaattgctccatctaccctggtaccatcactggacaccgcatggcatgggacatgatgatgaactggtcgcccacggctaccatgatcttggcgtacgcgatgcgtgtccccgaggtcattatagacatcattagcggggctcattggggcgtcatgttcggcttggcctacttctctatgcagggagcgtgggcgaaagtcgttgtcatccttctgttggccgccggggtggacgcgcgcacccatactgttgggggttctgccgcgcagaccaccgggcgcctcaccagcttatttgacatgggccccaggcagaaaatccagctcgttaacaccaatggcagctggcacatcaaccgcaccgccctgaactgcaatgactccttgcacaccggctttatcgcgtctctgttctacacccacagcttcaactcgtcaggatgtcccgaacgcatgtccgcctgccgcagtatcgaggccttccgggtgggatggggcgccttgcaatatgaggataatgtcaccaatccagaggatatgagaccctattgctggcactacccaccaaggcagtgtggcgtggtctccgcgaagactgtgtgtggcccagtgtactgtttcacccccagcccagtggtagtgggcacgaccgacaggcttggagcgcccacttacacgtggggggagaatgagacagatgtcttcctattgaacagcactcgaccaccgctggggtcatggttcggctgcacgtggatgaactcttctggctacaccaagacttgcggcgcaccaccctgccgtactagagctgacttcaacgccagcacggacctgttgtgccccacggactgttttaggaagcatcctgataccacttacctcaaatgcggctctgggccctggctcacgccaaggtgcctgatcgactacccctacaggctctggcattacccctgcacagttaactataccatcttcaaaataaggatgtatgtgggaggggttgagcacaggctcacggctgcatgcaatttcactcgtggggatcgttgcaacttggaggacagagacagaagtcaactgtctcctttgttgcactccaccacggaatgggccattttaccttgctcttactcggacctgcccgccttgtcgactggtcttctccacctccaccaaaacatcgtggacgtacaattcatgtatggcctatcacctgccctcacaaaatacatcgtccgatgggagtgggtaatactcttattcctgctcttagcggacgccagggtttgcgcctgcttatggatgctcatcttgttgggccaggccgaagcagcactagagaagctggtcatcttgcacgctgcgagcgcagctagctgcaatggcttcctatattttgtcatctttttcgtggctgcttggtacatcaagggtcgggtagtccccttagctacctattccctcactggcctgtggtcctttagcctactgctcctagcattgccccaacaggcttatgcttatgacgcatctgtgcatggccagataggagcggctctgctggtaatgatcaccctcttcacactcaccccggggtataagaccctcctcggccagtgtctgtggtggttgtgctatctcctgaccctgggggaagccatgattcaggagtgggtaccacccatgcaggtgcgcggcggccgcgatggcatcgcgtgggccgtcactatattctgcccgggtgtggtgtttgacattaccaaatggcttttggcgttgcttgggcctgcttacctcttaagggccgctttgacacatgtgccgtacttcgtcagagctcacgctctgataagggtatgcgctttggtgaagcagctcgcggggggtaggtatgttcaggtggcgctattggcccttggcaggtggactggcacctacatctatgaccacctcacacctatgtcggactgggccgctagcggcctgcgcgacttagcggtcgccgtggaacccatcatcttcagtccgatggagaagaaggtcatcgtctggggagcggagacggctgcatgtggggacattctacatggacttcccgtgtccgcccgactcggccaggagatcctcctcggcccagctgatggctacacctccaaggggtggaagctccttgcgcctatcactgcttatgcccagcagacacgaggcctattgggcgccatagtggtgagcatgacgggccgtgacaagacagaacaggccggggagatccaggtcctctccacagtcactcaaaccttcctcgggactaccatctcaggagtcttgtggaccgtctaccacggggctggcaacaagaccctagccggctcgcggggcccggtcacacagatgtactccagcgccgagggagacttggtagggtggcccagtcctcccgggactaaatccatggagccgtgcacgtgcggagcggtcgacctgtacctggtcacgcggaacgctgacgtcatcccggctcggagacgcggggacaagcggggagcgttgctctccccgagacctctctcaactctgaaggggtcttcggggggaccggtgctctgccccaggggccacgttgtcgggatcttccgggcagccatatgctcgcggggcgtggccaagtccatagatttcatccccgttgaggcaattgacatcgtcacgcgctcccccacctttactgacaacagcacgccaccggctgtgccccagacctatcaggttggatacttgcacgccccgactggcagcgggaagagcaccaaagtccctgtcgcatatgccgcccaggggtataaggtgctagtgctcaatccctcggtggccgccaccttggggtttggggcgtacttggccaaggcgcacggcatcaatcctaacattaggactggagtcaggactgtgacgaccggggaggctattacgtattccacgtatggcaagtttctcgctgatgggggctgcgcaggcggcgcctatgacatcatcatatgcgatgagtgccatgccacggatgctaccacccttctcggcatcggaacagttcttgaccaagcagagtcagctggggtcaggctaactgtgctggccacggctacgcctcccggatcaataacaacccctcaccccaacatagaggaggtagctctcggacaggagggtgagatccccttctatgggagagcgatccccctggcccacatcaagggagggaggcacctgatcttctgccactcgaagaaaaagtgtgacgagctcgcggcggccctccgggccatgggcttgaacgctgtggcatactacagagggttggacgtctccataataccagctcaaggagacgtggtggttgtcgccactgacgccctcatgacagggtacactggagactttgactccgtgattgactgcaacgtagcggttactcaagtcgtggacttcagcttggaccccaccttcaccatatccacacaaaccgtcccccaagacgccgtctcacgcagccagcgccgggggcgcacgggcagagggagactgggcatttacaggtacgtttccactggtgagcgagcttcgggaatgtttgacagcgtaacgctctgcgagtgctacgatgcaggggctgcatggtatgatctcacaccagcggaaaccaccgtcaggcttagggcgtatttcaacacgcccggcctgcccgtgtgccaagaccacctcgagttttgggaggcagttttcaccggcctcacacacatagatgcccactacctttcccaaacaaagcaagcgggggagaatttcgcatacctgacagcctatcaggccacagtgtgtgccagagccaaagcccctcccccgtcttgggacgtcatgtggaagtgcctgactcgactcaaacccacgctcgtgggccccacacctctcctgtaccgcctgggttcagttaccaacgatgtcaccttcacacaccctgtgacaaagtacatcgctacttgcatgcaagctgacctcgaggtcatgaccagcacgtgggtcctagccgggggagtcctggctgccatcgccgcgtactgcttggcgactgggtgtgtttccatcatcggccgtttgcacgtcaaccagcgaaccgtcgttgcacctgacaaggaggtcctctatgaggcttttgacgagatggaggagtgtgcttccagagcggccctcattgaggaggcgcaacggatagccgagatgctgaagtctaagatccaaggcttattgcagcaggcttccaagcaggcccaggacatacaaccaaccgtgcaggcttcatggcccaaggtggagcaattctgggccaaacacatgtggaacttcattagcggcatccaatatcttgcgggactgtcaacgctgccagggaaccccgctgtggcctctatgatggcattcagtgccgccatcaccagtccgctgtcgactagcaccaccatccttctcaacatcatgggaggctggctggcgtctcaaattgcgccacccgcaggggccacaggcttcgtggtcagtggcctggtgggggctgccataggcagcgtaggcttgggtaaggtgctggtggacatcttggcagggtacggtgcgggcatttcgggggctctcgtcgcattcaagatcatgtctggcgagaagccctccatggaggatgtcatcaacctgctgcccggaatcctgtccccgggcgccctggtggtgggggtcatttgcgcggccattctgcgccgtcatgtgggaccgggggaaggtgcggtccaatggatgaataggcttattgcctttgcttccagaggaaaccacgtcgcccccacccactatgtgacggagtcagatgcgtcgcagcgcgtgacccaactacttggctctctcaccataactagcctgcttagaaggctccacaattggattactgaggactgccccaccccatgcaatggctcatggctccgcgatgtgtgggactgggtgtgcaccatcctgactgactttaaaaactggctgacctccaagttgttcccaaagctgcccggcctccccttcatctcttgccaaaaggggtataggggcgactgggccggcacgggcatcatggtcacgcggtgcccttgtggcgccaacatttctggcaatgtccgcttcggctctatgagaatcacagggcctaagacctgcatgaacacctggcaggggactttccctatcaactgctacacggagggccaatgcatgccgagacctgcgccaaactttaagaccgccatctggagggtggcggcctcagagtacgcggaggtgacgcggcacgggtcgtactcttacataacagggctgaccgctgacaatctgaaggttccctgccaaataccatctccagagttcttttcctgggtagacggagtacagatccacaggtttgctcccactccaaagccgttctttcgggatgaggtctcgttcagcgtggggctcaactcatttgtagtcgggtctcagcttccctgcgaccctgaacccgacgcggacgtgttgatgtccatgctaacagatcctggccatatcacggcagaggctgcagcgcggcgcttagcgcgggggtcacccccatctgaggcaagctcctcagcaagccagctgtcggccccgtcgctgcgttccacctgtgccacccacggcacggcctatgatgtggccatggtggatgctaacctgttcatgaagggggaagtgattcggatagagtccgattccaaagtggtcgttctggactctctcgacccactggccgaagaggtgagcgacgtcgaaccctctataccatcagagtacttgatccccaagaaacaattcccaccagccttgccggcctgggcgcggcctgactacaacccaccgcttgtggaatcgtggaggaagcctgactaccaaccacccactgtcgcgggctgtgctctccccccccccaagaagaccccgacgccccccccaaggaagcgtcggacggtgagactcagtgagagcgccgtgggagacatcctccaacagctggctattaagacctttggccagccccctccaagcggaggcccagacccccccacgggggcgggcgccgccggctccggcggtcagacgccccctgatgagccggctccttcggagacggattctgtctcctccatgcccccccttgagggggagcccggagacccagacctggagcttggccaggtagagccccaaccccccccccaggggggggaggcggctcccgactcagactctgggtcgtggtctacctgctccgaggaggaggattccaccgtgtgctgctccatgtcatactcctggaccggggcccttataactccttgcagccccgaagaggagaagttgccaatcaatcccctgagcaactcattgttgcgctaccacaacaaggtgtactgcactacatcaagaagtgcgtcactgagggccaaaaaggtaacttttgacaggatgcaagtactcgatgcccactatgactcagtcttaaaggacattaagctagcggcctccaaggtcagcgcaaggtccctcagcttggaggaggcgtgcaagctgaccccgccccactctgcgaggtccaaatatggatttggggctaaggaggtccgcagcttgtccgggagggccgtcaaccacatcaagtccgtgtggaaggacctcttggaagactcacaaacaccaatacctacaaccatcatggccaagaatgaggtgttctgcgtgaaccctgctaaggggggcaagaaagcagctcgcctcatcgtttaccccgaccttggtgtcagggtctgcgaaaagatggccctctatgatgttgcacaaaagcttcctcaggcggtgatgggggcctcctatgggttccagtactctcccgcccagcgggtggagtttctcttgaaagcgtgggcggacaagaaagaccctatgggtttttcgtatgatacccgatgctttgactcaactgtcactgagagagacataagaactgaggaggacatatacctgtcctgctccctacccgaggaggcccgcactgccacacactcgctgactgagagactttacgtgggagggcccatgttcaacagcaagggccagacctgcgggtacaggcgttgccgcgctagcggggtgctcaccactagcatggggaataccatcacatgctatgtaaaagccctagcggcctgcaaggccgcagggatagttgcacccacgatgctggtatgcggcgatgacttggttgtcatctcagaaagccaggggactgaggaggacgagcggaacctgagagccttcacggaggctatgaccaggtattctgcccctcctggtgacccccccagaccggaatacgacttggagctgataacatcctgctcctcaaatgtgtctgtggcacttggcccccggggcaaccgcagatactatctgaccagagaccccaccactccaatcgcccgggctgcctgggaaacagtcagacactcccctgtcaattcatggctgggaaacatcatccagtacgctccaaccatatgggttcgtatggtcctgatgacacatttctactccattctcatggcccaagacactctggaccagaaccttaactttgaaatgtatggagctgtgtactctgtaagtcccttggacctcccagccataattgaaaagctccatgggcttgacgctttctctctgcacacatactctcccaacgaactgacgcgagtggcttcagccctcagaaaacttggggcgccacccctcagagcgtggaagagccgggcgcgtgcagtcagagcgtccctcatctcccgtggagggagagcggccgtctgcggtcgatatctcttcaactgggcggtgaagaccaagctcaaactcactccattgccggaggcgcgccatctggatttatccagttggttcaccgtcggcgccggcgggggcgacatttatcacagcgtgtcgcgtgcccgaccccgcttgttactccttagcctactcctactctttgtaggagtaggccttttcctactccccgctcggtagagcggcacacattagctacactccatagctaactgttccattttttttttttttttttttttttttttttttttttttttttttttttttttttttttttttcttttccttcctttctttttcactttacttcattctttcctggtggctccatcttagccctagtcacggctagctgtgaaaggtccgtgagccgcatgactgcagagagtgccgtaactggtctctctgcagatcatgt

SEQ ID NO: 13 - DNA, 9686 bp, Artificial Sequence
  synthetic DNA
acccgcccctaataggggcgacactccgccatgaatcactcccctgtgaggaactactgtcttcacgcagaaagcgtctagccatggcgttagtatgagtgtcgtacagcctccaggcccccccctcccgggagagccatagtggtctgcggaaccggtgagtacaccggaattgccgggaagactgggtcctttcttggataaacccactctatgcccggccatttgggcgtgcccccgcaagactgctagccgagtagcgttgggttgcgaaaggccttgtggtactgcctgatagggtgcttgcgagtgccccgggaggtctcgtagaccgtgcatcatgagcacaaatcccaaacctcaaagaaaaaccaacagaaacaccaaccgtcgcccacaagacgtcaagtttccgggcggcggccagatcgttggcggagtatacttgctgccgcgcaggggccccaggttgggtgtgcgcgcggcaaggaaaacttcggagcggtcacagccccgtgggagacgccagcccatccccaaagatcggcgtcccactggcaagtcctggggaaaaccaggatacccttggcccttatatgggaacgaggggctcggctgggcaggatggctcctgtccccccagggctcccgtccctcttggggccccactgacccccggcgtaggtcgcgcaatgtgggtaaggtcatcgacaccctaacgtgcggcttcgccgacctcatggggtacatccccgtcgtaggcgccccgcttggcggtgtcgccagagctctcgcgcatggcgtgagggccctggaggacggggtcaactatgcaacagggaacttacccggttgccccttttctatcttcttgctggccctactgtcctgcatcaccactccggtctcagctgcccaggtgaaaaacaccagtgacatctacatggtgactaacgactgtcccaacagcagcatcacctggcagcttagggccgcagtcctccacgtccccggatgtgtcccgtgtgagaaagtggggaatacatctcagtgctggacgccggtctcacccaatgtggctgtgcagcaacccggcgccctcacgcggggcttgcggacgcacatcgatatcgttgtaatgtccgctacgctctgctccgctctctatgtgggggacctctgcggcggggtaatgctcgcggcccagatattcatcgtctcgccacaacaccactggttcgtgcaagagtgcaattgctccatctaccctggtaccatcactggtcaccgtatggcatgggacatgatgatgaactggtcgcccacagctaccatgatcctggcgtacgcgacacgtgttcccgaggtcatcatagacatcattagcggggctcactggggtgtcatgttcggcctggcctacttctctatgcagggagcgtgggcgaaggtcgttgtcatcctcctgctggccgctggggtggacgcacataccaacttcgtcattggggcccaggtggggcgcaccgccagtagccttaatagcttgttcaccgtcggcgctaagcagaacatccagctgatcaactccaatggcagttggcacatcaaccgcactgctctgaactgcaatgactctctgaacaccggcttcctcgcgtccctgttctacaccaatcgcttcaactcgtcgggatgcccagaacgtctggcatcctgccgtaggattgaggccttcaggataggatggggcactctgcaatatgagcacaatgtcaccaattcagaggatatgagaccatactgctggcattatccacccaaaccttgtggtatagtccccgcgaggtctgtgtgtggcccggtgtactgtttcacacccagcccagtagtagtgggcacgaccgacaggcgtggagtgcccacttacacgtggggggagaatgagacggacgtcttcctactgaacagcacccggccaccgcgggggtcatggttcggctgtacgtggatgaactccactggcttcaccaagacttgtggcgcaccaccttgccgcattagagctgatttcaatgccagcacggacctgttgtgccccacggactgttttaggaaacaccctgacgccacttacatcaagtgtggctccgggccctggctcacgcccagatgcctggtcgactacccctacaggctctggcactacccctgcacagtcaactatagcatcttcaagataaggatgtacgtggggggggttgaacacaggcttacagctgcctgtaacttcacccgcggggatccttgcaacttggatgacagagacagaagtcaactgtcccccttgttgcactctaccacggagtgggccatcttgccctgcacttactctgacctgcccgccttgtcgaccggtctcctccacctccaccaaaacatcgtggacgtgcaatacatgtacggcctttcaccagccgtcacgaagtacatagtccggtgggagtgggtagtgctcttgttcctgctcttggcggacgccagggtctgtgcctgtgtatggatgctcatcctgctgggccaagccgaggcagccctagagaagctggttgttttgcacgccgcgagtgcggctggctgcaatggctttctatatttcatcatctttttcgtggctgcgtggtgcatcaagggtcgagtggtccccttggctacctattccctcatcggcctatggtccttcttcctactgctcctagcattgcctcaacaggcttatgcttatgatgcaactgtgcatggacaaataggcgtggccctgttggtgctgctcaccctctttacactcaccccggcatataagaccctcctgggccggtgtctgtggtggctgtgctatctcctgaccttgggagaggccctcgtccaggagtgggcaccctccatgcaggcgcgcggtggccgggatggcatcatatgggctgccaccatattctgcccgggtgtggtgtttgacataaccaagtggcttttggcgatacttggacctggttatctcctaagagatgctttgacacgcgtgccgtatttcgtcagagcccacgctctgctgagaatgtgcgccatggtgaagcacctcgtggggggtaagtacgtccagatggcgctattaacccttggtaggtggactggcacttacatctacgaccacctcgcccccatgtcggattgggctgccagcggcctgcgggacctggcggtcgctgtggaacctatcatcttcagtccgatggagaaaaaagtcatcgtatggggagcggagacagccgcgtgcggggacatcttgcacggacttcccgtgtctgctcggcttggtcgagagatccttcttggcccagctgacggctacacctctaaggggtggaagcttcttgcgcctatcactgcttatgcccagcagacacgaggtctcttgggcgccatagtggtgagcatgacaggccgtgacaaaacggaacaggccggggagatccaagtcctgtccacggtcactcagaccttcctcggaactaccatctcaggggtcttatggaccgtctaccacggagctggcaacaagaccttagccggttcgcggggcccggtcacgcagatgtactccagtgccgagggagacttggtggggtggcccagtccccccgggaccaaatccatggagccgtgcacatgcggagcggtcgacctgtatctggtcacgcggaacgctgatgtcatcccggctcggagacgcggggacaagcggggagcgttgctctccccgagacctctctcgaccttgaaggggtcctcagggggaccggtgctttgccccaggggccacgttgttgggatcttccgggcagccatatgctctcggggcgtggccaagtccatagacttcatccccgttgagatgcttgacatcgtcacgcgctcccccacctttaccgacaacagcacgccaccggctgtgccccggacctatcaggttggatacctgcacgccccaaccggcagcgggaagagcaccaaggtccctgttgcatacgccgcccaggggtacaaagtactagtgctgaatccctcggtggcggccaccctggggttcggggcatacttggccaaggcacatggcatcaatcccaatattaggactggagtcaggactgtgacgactggggaggccatcacgtactccacgtatggcaagttcctcgccgatgggggctgtgcaggcggcgcctatgacatcatcatatgcgatgaatgccacgccacggacgctaccacccttctcggcatcggaacagttcttgaccaagcagaatcagctggggtcaggctaaccgtactggccacggccacgcctcccgggtcgataacaacccctcatcccaatatagaggaggtggccctcggacaggagggcgagatccccttctatgggaaggcgatccccctggctcacatcaagggagggaggcatttgatcttctgccactcaaagaagaagtgtgacgagctcgcggcggccctccgggccatgggcttgaacgctgtggcatactacagagggttggacgtctccataataccagctcaaggagacgtggtggttgtcgccactgacgccctcatgacagggtacactggagactttgactccgtgattgactgcaacgtagcggttactcaagtcgtggacttcagcttggaccccaccttcaccatatccacacaaaccgtcccccaagacgccgtctcacgcagccagcgccgggggcgcacgggcagagggagactgggcatttacaggtacgtttccactggtgagcgagcttcgggaatgtttgacagcgtaacgctctgcgagtgctacgatgcaggggctgcatggtatgatctcacaccagcggaaaccaccgtcaggcttagggcgtatttcaacacgcccggcctgcccgtgtgccaagaccacctcgagttttgggaggcagttttcaccggcctcacacacatagatgcccactacctttcccaaacaaagcaagcgggggagaatttcgcatacctgacagcctatcaggccacagtgtgtgccagagccaaagcccctcccccgtcttgggacgtcatgtggaagtgcctgactcgactcaaacccacgctcgtgggccccacacctctcctgtaccgcctgggttcagttaccaacgatgtcaccttcacacaccctgtgacaaagtacatcgctacttgcatgcaagctgacctcgaggtcatgaccagcacgtgggtcctagccgggggagtcctggctgccatcgccgcgtactgcttggcgactgggtgtgtttccatcatcggccgtttgcacgtcaaccagcgaaccgtcgttgcacctgacaaggaggtcctctatgaggcttttgacgagatggaggagtgtgcttccagagcggccctcattgaggaggcgcaacggatagccgagatgctgaagtctaagatccaaggcttattgcagcaggcttccaagcaggcccaggacatacaaccaaccgtgcaggcttcatggcccaaggtggagcaattctgggccaaacacatgtggaacttcattagcggcatccaatatcttgcgggactgtcaacgctgccagggaaccccgctgtggcctctatgatggcattcagtgccgccatcaccagtccgctgtcgactagcaccaccatccttctcaacatcatgggaggctggctggcgtctcaaattgcgccacccgcaggggccacaggcttcgtggtcagtggcctggtgggggctgccataggcagcgtaggcttgggtaaggtgctggtggacatcttggcagggtacggtgcgggcatttcgggggctctcgtcgcattcaagatcatgtctggcgagaagccctccatggaggatgtcatcaacctgctgcccggaatcctgtccccgggcgccctggtggtgggggtcatttgcgcggccattctgcgccgtcatgtgggaccgggggaaggtgcggtccaatggatgaataggcttattgcctttgcttccagaggaaaccacgtcgcccccacccactatgtgacggagtcagatgcgtcgcagcgcgtgacccaactacttggctctctcaccataactagcctgcttagaaggctccacaattggattactgaggactgccccaccccatgcaatggctcatggctccgcgatgtgtgggactgggtgtgcaccatcctgactgactttaaaaactggctgacctccaagttgttcccaaagctgcccggcctccccttcatctcttgccaaaaggggtataggggcgactgggccggcacgggcatcatggtcacgcggtgcccttgtggcgccaacatttctggcaatgtccgcttcggctctatgagaatcacagggcctaagacctgcatgaacacctggcaggggactttccctatcaactgctacacggagggccaatgcatgccgagacctgcgccaaactttaagaccgccatctggagggtggcggcctcagagtacgcggaggtgacgcggcacgggtcgtactcttacataacagggctgaccgctgacaatctgaaggttccctgccaaataccatctccagagttcttttcctgggtagacggagtacagatccacaggtttgctcccactccaaagccgttctttcgggatgaggtctcgttcagcgtggggctcaactcatttgtagtcgggtctcagcttccctgcgaccctgaacccgacgcggacgtgttgatgtccatgctaacagatcctggccatatcacggcagaggctgcagcgcggcgcttagcgcgggggtcacccccatctgaggcaagctcctcagcaagccagctgtcggccccgtcgctgcgttccacctgtgccacccacggcacggcctatgatgtggccatggtggatgctaacctgttcatgaagggggaagtgattcggatagagtccgattccaaagtggtcgttctggactctctcgacccactggccgaagaggtgagcgacgtcgaaccctctataccatcagagtacttgatccccaagaaacaattcccaccagccttgccggcctgggcgcggcctgactacaacccaccgcttgtggaatcgtggaggaagcctgactaccaaccacccactgtcgcgggctgtgctctccccccccccaagaagaccccgacgccccccccaaggaagcgtcggacggtgagactcagtgagagcgccgtgggagacatcctccaacagctggctattaagacctttggccagccccctccaagcggaggcccagacccccccacgggggcgggcgccgccggctccggcggtcagacgccccctgatgagccggctccttcggagacggattctgtctcctccatgcccccccttgagggggagcccggagacccagacctggagcttggccaggtagagccccaaccccccccccaggggggggaggcggctcccgactcagactctgggtcgtggtctacctgctccgaggaggaggattccaccgtgtgctgctccatgtcgtactcctggaccggggcccttataactccttgcagccccgaagaggagaagttgccaatcaatcccctgagcaactcattgttgcgctaccacaacaaggtgtactgcactacatcaagaagtgcgtcactgagggccaaaaaggtaacttttgacaggatgcaagtactcgatgcccactatgactcagtcttaaaggacattaagctagcggcctccaaggtcagcgcaaggtccctcagcttggaggaggcgtgcaagctgaccccgccccactctgcgaggtccaaatatggatttggggctaaggaggtccgcagcttgtccgggagggccgtcaaccacatcaagtccgtgtggaaggacctcttggaagactcacaaacaccaatacctacaaccatcatggccaagaatgaggtgttctgcgtgaaccctgctaaggggggcaagaaagcagctcgcctcatcgtttaccccgaccttggtgtcagggtctgcgaaaagatggccctctatgatgttgcacaaaagcttcctcaggcggtgatgggggcctcctatgggttccagtactctcccgcccagcgggtggagtttctcttgaaagcgtgggcggacaagaaagaccctatgggtttttcgtatgatacccgatgctttgactcaactgtcactgagagagacataagaactgaggaggacatatacctgtcctgctccctacccgaggaggcccgcactgccacacactcgctgactgagagactttacgtgggagggcccatgttcaacagcaagggccagacctgcgggtacaggcgttgccgcgctagcggggtgctcaccactagcatggggaataccatcacatgctatgtaaaagccctagcggcctgcaaggccgcagggatagttgcacccacgatgctggtatgcggcgatgacttggttgtcatctcagaaagccaggggactgaggaggacgagcggaacctgagagccttcacggaggctatgaccaggtattctgcccctcctggtgacccccccagaccggaatacgacttggagctgataacatcctgctcctcaaatgtgtctgtggcacttggcccccggggcaaccgcagatactatctgaccagagaccccaccactccaatcgcccgggctgcctgggaaacagtcagacactcccctgtcaattcatggctgggaaacatcatccagtacgctccaaccatatgggttcgtatggtcctgatgacacatttctactccattctcatggcccaagacactctggaccagaaccttaactttgaaatgtatggagctgtgtactctgtaagtcccttggacctcccagccataattgaaaagctccatgggcttgacgctttctctctgcacacatactctcccaacgaactgacgcgagtggcttcagccctcagaaaacttggggcgccacccctcagagcgtggaagagccgggcgcgtgcagtcagagcgtccctcatctcccgtggagggagagcggccgtctgcggtcgatatctcttcaactgggcggtgaagaccaagctcaaactcactccattgccggaggcgcgccatctggatttatccagttggttcaccgtcggcgccggcgggggcgacatttatcacagcgtgtcgcgtgcccgaccccgcttgttactccttagcctactcctactctttgtaggagtaggccttttcctactccccgctcggtagagcggcacacattagctacactccatagctaactgttccattttttttttttttttttttttttttttttttttttttttttttttttttttttttttttttcttttccttcctttctttttcactttacttcattctttcctggtggctccatcttagccctagtcacggctagctgtgaaaggtccgtgagccgcatgactgcagagagtgccgtaactggtctctytgcagatcatgt

SEQ ID NO: 14 - protein, 2003 aa, Hepatitis C virus
APITAYAQQTRGLLGAIVVSMTGRDKTEQAGEIQVLSTVTQTFLGTTISGVLWTVYHGAGNKTLAGSRGPVTQMYSSAEGDLVGWPSPPGTKSMEPCTCGAVDLYLVTRNADVIPARRRGDKRGALLSPRPLSTLKGSSGGPVLCPRGHVVGIFRAAICSRGVAKSIDFIPVEAIDIVTRSPTFTDNSTPPAVPQTYQVGYLHAPTGSGKSTKVPVAYAAQGYKVLVLNPSVAATLGFGAYLAKAHGINPNIRTGVRTVTTGEAITYSTYGKFLADGGCAGGAYDIIICDECHATDATTLLGIGTVLDQAESAGVRLTVLATATPPGSITTPHPNIEEVALGQEGEIPFYGRAIPLAHIKGGRHLIFCHSKKKCDELAAALRAMGLNAVAYYRGLDVSIIPAQGDVVVVATDALMTGYTGDFDSVIDCNVAVTQVVDFSLDPTFTISTQTVPQDAVSRSQRRGRTGRGRLGIYRYVSTGERASGMFDSVTLCECYDAGAAWYDLTPAETTVRLRAYFNTPGLPVCQDHLEFWEAVFTGLTHIDAHYLSQTKQAGENFAYLTAYQATVCARAKAPPPSWDVMWKCLTRLKPTLVGPTPLLYRLGSVTNDVTFTHPVTKYIATCMQADLEVMTSTWVLAGGVLAAIAAYCLATGCVSIIGRLHVNQRTVVAPDKEVLYEAFDEMEECASRAALIEEAQRIAEMLKSKIQGLLQQASKQAQDIQPTVQASWPKVEQFWAKHMWNFISGIQYLAGLSTLPGNPAVASMMAFSAAITSPLSTSTTILLNIMGGWLASQIAPPAGATGFVVSGLVGAAIGSVGLGKVLVDILAGYGAGISGALVAFKIMSGEKPSMEDVINLLPGILSPGALVVGVICAAILRRHVGPGEGAVQWMNRLIAFASRGNHVAPTHYVTESDASQRVTQLLGSLTITSLLRRLHNWITEDCPTPCNGSWLRDVWDWVCTILTDFKNWLTSKLFPKLPGLPFISCQKGYRGDWAGTGIMVTRCPCGANISGNVRFGSMRITGPKTCMNTWQGTFPINCYTEGQCMPRPAPNFKTAIWRVAASEYAEVTRHGSYSYITGLTADNLKVPCQIPSPEFFSWVDGVQIHRFAPTPKPFFRDEVSFSVGLNSFVVGSQLPCDPEPDADVLMSMLTDPGHITAEAAARRLARGSPPSEASSSASQLSAPSLRATCATHGTAYDVAMVDANLFMKGEVIRIESDSKVVVLDSLDPLAEEVSDVEPSIPSEYLIPKKQFPPALPAWARPDYNPPLVESWRKPDYQPPTVAGCALPPPKKTPTPPPRKRRTVRLSESAVGNILQQLAIKTFGQPPPSGGPDPPTGAGAAGSGGQTPPDEPGPLETDFVSSMPPLEGEPGDPDLEVGQVKPQPPPQGGEAAPDSDSGSWSTCSEEEDSAVCCSMSYSWTGALITPCSPEEEKLPINPLSNSLLRYHNKVYCTTSRSASLRAKKVTFDRMQVLDAHYDSVLKDIKLAASKVSARSLSLEEACKLTPPHSARSKYGFGAKEVRSLSGRAVNHIKSVWKDLLEDSQTPIPTTIMAKNEVFCVNPAKGGKKAARLIVYPDLGVRVCEKMALYDVAQKLPQAVMGASYGFQYSPAQRVEFLLKAWADKKDPMGFSYDTRCFDSTVTERDIRTEEDIYLSCSLPEEARTAIHSLTERLYVGGPMFNSKGQTCGYRRCRASGVLTTSMGNTITCYVKALAACKAAGIVAPTMLVCGDDLVVISESQGTEEDERNLRAFTEAMTRYSAPPGDPPRPEYDLELITSCSSNVSVALGPRGNRRYYLTRDPTTPIARAAWETVRHSPVNSWLGNIIQYAPTIWVRMVLMTHFYSILMAQDTLDQNLNFEMYGAVYSVSPLDLPAIIEKLHGLDAFSLHTYSPNELTRVASALRKLGAPPLRAWKSRARAVRASLISRGGRAAVCGRYLFNWAVKTKLKLTPLPEARHLDLSSWFTVGAGGGDIYHSVSRARPRLLLLSLLLLFVGVGLFLLPAR

SEQ ID NO: 15 - protein, 2003 aa, Hepatitis C virus
APITAYAQQTRGLLGAIVVSMTGRDKTEQAGEIQVLSTVTQTFLGTTISGVLWTVYHGAGNKTLAGSRGPVTQMYSSAEGDLVGWPSPPGTKSMEPCTCGAVDLYLVTRNADVIPARRRGDKRGALLSPRPLSTLKGSSGGPVLCPRGHVVGIFRAAICSRGVAKSIDFIPVEMLDIVTRSPTFTDNSTPPAVPQTYQVGYLHAPTGSGKSTKVPVAYAAQGYKVLVLNPSVAATLGFGAYLAKAHGINPNIRTGVRTVTTGEAITYSTYGKFLADGGCAGGAYDIIICDECHATDATTLLGIGTVLDQAESAGVRLTVLATATPPGSITTPHPNIEEVALGQEGEIPFYGRAIPLAHIKGGRHLIFCHSKKKCDELAAALRAMGLNAVAYYRGLDVSIIPAQGDVVVVATDALMTGYTGDFDSVIDCNVAVTQVVDFSLDPTFTISTQTVPQDAVSRSQRRGRTGRGRLGIYRYVSTGERASGMFDSVTLCECYDAGAAWYDLTPAETTVRLRAYFNTPGLPVCQDHLEFWEAVFTGLTHIDAHYLSQTKQAGENFAYLTAYQATVCARAKAPPPSWDVMWKCLTRLKPTLVGPTPLLYRLGSVTNDVTFTHPVTKYIATCMQADLEVMTSTWVLAGGVLAAIAAYCLATGCVSIIGRLHVNQRTVVAPDKEVLYEAFDEMEECASRAALIEEAQRIAEMLKSKIQGLLQQASKQAQDIQPTVQASWPKVEQFWAKHMWNFISGIQYLAGLSTLPGNPAVASMMAFSAAITSPLSTSTTILLNIMGGWLASQIAPPAGATGFVVSGLVGAAIGSVGLGKVLVDILAGYGAGISGALVAFKIMSGEKPSMEDVINLLPGILSPGALVVGVICAAILRRHVGPGEGAVQWMNRLIAFASRGNHVAPTHYVTESDASQRVTQLLGSLTITSLLRRLHNWITEDCPTPCNGSWLRDVWDWVCTILTDFKNWLTSKLFPKLPGLPFISCQKGYRGDWAGTGIMVTRCPCGANISGNVRFGSMRITGPKTCMNTWQGTFPINCYTEGQCMPRPAPNFKTAIWRVAASEYAEVTRHGSYSYITGLTADNLKVPCQIPSPEFFSWVDGVQIHRFAPTPKPFFRDEVSFSVGLNSFVVGSQLPCDPEPDADVLMSMLTDPGHITAEAAARRLARGSPPSEASSSASQLSAPSLRATCATHGTAYDVAMVDANLFMKGEVIRIESDSKVVVLDSLDPLAEEVSDVEPSIPSEYLIPKKQFPPALPAWARPDYNPPLVESWRKPDYQPPTVAGCALPPPKKTPTPPPRKRRTVRLSESAVGNILQQLAIKTFGQPPPSGGPDPPTGAGAAGSGGQTPPDEPVLLETDFVSSMPPLEGEPGDPNLEVGQVKPQPPPQGGEAAPDSDSGSWSTCSEEEDSTVCCSMSYSWTGALITPCSPEEEKLPINPLSNSLLRYHNKVYCTTSRSASLRAKKVTFDRMQVLDAHYDSVLKDIKLAASKVSARSLSLEEACKLTPPHSARSKYGFGAKEVRSLSGRAVNHIKSVWKDLLEDSQTPIPTTIMAKNEVFCVNPAKGGKKAARLIVYPDLGVRVCEKMALYDVAQKLPQAVMGASYGFQYSPAQRVEFLLKAWADKKDPMGFSYDTRCFDSTVTERDIRTEEDIYLSCSLPEEARTAIHSLTERLYVGGPMFNSKGQTCGYRRCRASGVLTTSMGNTITCYVKALAACKAAGIVAPTMLVCGDDLVVISESQGTEEDERNLRAFTEAMTRYSAPPGDPPRPEYDLELITSCSSNVSVALGPRGNRRYYLTRDPTTPIARAAWETVRHSPVNSWLGNIIQYAPTIWVRMVLMTHFYSILMAQDTLDQNLNFEMYGAVYSVSPLDLPAIIEKLHGLDAFSLHTYSPNELTRVASALRKLGAPPLRAWKSRARAVRASLISRGGRAAVCGRYLFNWAVKTKLKLTPLPEARHLDLSSWFTVGAGGGDIYHSVSRARPRLLLLSLLLLFVGVGLFLLPAR

SEQ ID NO: 16 - DNA, 18 bp, Artificial Sequence
  synthetic DNA
taatacgactcactatag

SEQ ID NO: 17 - DNA, 20 bp, Artificial Sequence
  synthetic DNA
gcggctcacggacctttcac

SEQ ID NO: 18 - DNA, 20 bp, Artificial Sequence
  synthetic DNA
ccggaattctaatacgactc

SEQ ID NO: 19 - DNA, 30 bp, Artificial Sequence
  synthetic DNA
gggcgtgttgagatacgctctaagcctgac

SEQ ID NO: 20 - DNA, 20 bp, Artificial Sequence
  synthetic DNA
ctgcagcaagccttggatct

SEQ ID NO: 21 - DNA, 30 bp, Artificial Sequence
  synthetic DNA
ttagagcgtatctcaacacgcccggcctac

SEQ ID NO: 22 - DNA, 30 bp, Artificial Sequence
  synthetic DNA
agtcgggccagccacttccacatggcgtcc

SEQ ID NO: 23 - DNA, 30 bp, Artificial Sequence
  synthetic DNA
atgtggaagtggctggcccgactcaagcct

SEQ ID NO: 24 - DNA, 30 bp, Artificial Sequence
  synthetic DNA
cttgcatgcaattggcgatgtacttcgtcc

SEQ ID NO: 25 - DNA, 30 bp, Artificial Sequence
  synthetic DNA
gtacatcgccaattgcatgcaagctgacct

SEQ ID NO: 26 - DNA, 20 bp, Artificial Sequence
  synthetic DNA
tgggacgccatgtggaagtg

SEQ ID NO: 27 - DNA, 30 bp, Artificial Sequence
  synthetic DNA
tgatccccgtgtcaagcgccgcgccgcagt

SEQ ID NO: 28 - DNA, 20 bp, Artificial Sequence
  synthetic DNA
aaagttacctttttagccct

SEQ ID NO: 29 - DNA, 30 bp, Artificial Sequence
  synthetic DNA
cgcggcgcttgacacggggatcacctccat

SEQ ID NO: 30 - DNA, 30 bp, Artificial Sequence
  synthetic DNA
ggtgcaggtggaccgcagcgacggtgctga

SEQ ID NO: 31 - DNA, 30 bp, Artificial Sequence
  synthetic DNA
ccgtcgctgcggtccacctgcaccacccac

SEQ ID NO: 32 - DNA, 30 bp, Artificial Sequence
  synthetic DNA
taggtgttgctttgggtggtgcaggtggcc

SEQ ID NO: 33 - DNA, 30 bp, Artificial Sequence
  synthetic DNA
ctgcaccacccaaagcaacacctatgacgt

SEQ ID NO: 34 - DNA, 19 bp, Artificial Sequence
  synthetic DNA
tacttgatccccgagaaac

SEQ ID NO: 35 - DNA, 19 bp, Artificial Sequence
  synthetic DNA
tgggaattgtttctcgggg

SEQ ID NO: 36 - DNA, 30 bp, Artificial Sequence
  synthetic DNA
gcgttccaccagtgccacccacggcacggc

SEQ ID NO: 37 - DNA, 20 bp, Artificial Sequence
  synthetic DNA
ccacacggacttgatgtggt

SEQ ID NO: 38 - DNA, 30 bp, Artificial Sequence
  synthetic DNA
caagaccgccatctggagggtggcggcctc

SEQ ID NO: 39 - DNA, 30 bp, Artificial Sequence
  synthetic DNA
ggtggcactggtggaacgcagcgacggggc

SEQ ID NO: 40 - DNA, 30 bp, Artificial Sequence
  synthetic DNA
ttcagccctcagaaaacttggggcgccacc

SEQ ID NO: 41 - DNA, 30 bp, Artificial Sequence
  synthetic DNA
ggagtaggctagggagtaacaagcggggtc

SEQ ID NO: 42 - DNA, 30 bp, Artificial Sequence
  synthetic DNA
ttgttactccctagcctactcctactcttt

SEQ ID NO: 43 - DNA, 16 bp, Artificial Sequence
  synthetic DNA
aacagctatgaccatg

SEQ ID NO: 44 - DNA, 18 bp, Artificial Sequence
  synthetic DNA
cagcttgtccgggagggc

SEQ ID NO: 45 - DNA, 20 bp, Artificial Sequence
  synthetic DNA
agccatgaattgatagggga

SEQ ID NO: 46 - DNA, 30 bp, Artificial Sequence
  synthetic DNA
tgccgcgcaggggccccaggttgggtgtgc

SEQ ID NO: 47 - DNA, 30 bp, Artificial Sequence
  synthetic DNA
gagagctctggtgacgccgccgagcggggc

SEQ ID NO: 48 - DNA, 30 bp, Artificial Sequence
  synthetic DNA
ggcggcgtcaccagagctctcgcgcatggc

SEQ ID NO: 49 - DNA, 20 bp, Artificial Sequence
  synthetic DNA
gctccctgcatagagaagta

SEQ ID NO: 50 - DNA, 20 bp, Artificial Sequence
  synthetic DNA
acggactgttttaggaagca

SEQ ID NO: 51 - DNA, 18 bp, Artificial Sequence
  synthetic DNA
tcttgtcgcgccccgtca

SEQ ID NO: 52 - DNA, 20 bp, Artificial Sequence
  synthetic DNA
aatttcactcgtggggatcg

SEQ ID NO: 53 - DNA, 23 bp, Artificial Sequence
  synthetic DNA
tgaccttcttctccatcggactg

SEQ ID NO: 54 - DNA, 19 bp, Artificial Sequence
  synthetic DNA
aagtgtgacgagctcgcgg

SEQ ID NO: 55 - DNA, 20 bp, Artificial Sequence
  synthetic DNA
tatgacatggagcagcacac

SEQ ID NO: 56 - DNA, 27 bp, Artificial Sequence
  synthetic DNA
agagggttggacgtctccataatacca

SEQ ID NO: 57 - DNA, 30 bp, Artificial Sequence
  synthetic DNA
caggccgcgcccaggccggcaaggctggtg

SEQ ID NO: 58 - DNA, 30 bp, Artificial Sequence
  synthetic DNA
taagacctgcatgaacacctggcaggggac

SEQ ID NO: 59 - DNA, 28 bp, Artificial Sequence
  synthetic DNA
acatgatctgcagagagaccagttacgg

SEQ ID NO: 60 - DNA, 30 bp, Artificial Sequence
  synthetic DNA
ataccatctccagagttcttttcctgggta

SEQ ID NO: 61 - DNA, 21 bp, Artificial Sequence
  synthetic DNA
tacggcacctctctgcagtca

SEQ ID NO: 62 - DNA, 19 bp, Artificial Sequence
  synthetic DNA
aagtgtgacgagctcgcgg

SEQ ID NO: 63 - DNA, 20 bp, Artificial Sequence
  synthetic DNA
tatgacatggagcagcacac

SEQ ID NO: 64 - DNA, 27 bp, Artificial Sequence
  synthetic DNA
agagggttggacgtctccataatacca

SEQ ID NO: 65 - DNA, 30 bp, Artificial Sequence; identical to SEQ ID NO: 57
  synthetic DNA

SEQ ID NO: 66 - DNA, 20 bp, Artificial Sequence
  synthetic DNA
ctgtgaggaactactgtctt

SEQ ID NO: 67 - DNA, 18 bp, Artificial Sequence
  synthetic DNA
ccagtccacctgccaagg

SEQ ID NO: 68 - DNA, 20 bp, Artificial Sequence
  synthetic DNA
ttcacgcagaaagcgtctag

SEQ ID NO: 69 - DNA, 20 bp, Artificial Sequence
  synthetic DNA
tccacgatgttttggtggag

SEQ ID NO: 70 - DNA, 19 bp, Artificial Sequence
  synthetic DNA
ctgtggcatactacagagg

SEQ ID NO: 71 - DNA, 20 bp, Artificial Sequence
  synthetic DNA
ttctcgccagacatgatctt

SEQ ID NO: 72 - DNA, 27 bp, Artificial Sequence
  synthetic DNA
agagggttggacgtctccataatacca

SEQ ID NO: 73 - DNA, 20 bp, Artificial Sequence
  synthetic DNA
ttctcgccagacatgatctt

SEQ ID NO: 74 - DNA, 19 bp, Artificial Sequence
  synthetic DNA
aagtgtgacgagctcgcgg

SEQ ID NO: 75 - DNA, 20 bp, Artificial Sequence
  synthetic DNA
tatgacatggagcagcacac

SEQ ID NO: 76 - DNA, 27 bp, Artificial Sequence
  synthetic DNA
agagggttggacgtctccataatacca

SEQ ID NO: 77 - DNA, 30 bp, Artificial Sequence; identical to SEQ ID NO: 57
  synthetic DNA

SEQ ID NO: 78 - DNA, 9530 bp, Artificial Sequence
  synthetic DNA: J6/JFH-2.1 A2217S(CS)
accggtgagtacaccggaattgccgggaagactgggtcctttcttggataaacccactctatgcccggccatttgggcgtgcccccgcaagactgctagccgagtagcgttgggttgcgaaaggccttgtggtactgcctgatagggtgcttgcgagtgccccgggaggtctcgtagaccgtgcaccatgagcacaaatcctaaacctcaaagaaaaaccaaaagaaacaccaaccgtcgcccacaagacgttaagtttccgggcggcggccagatcgttggcggagtatacttgttgccgcgcaggggccccaggttgggtgtgcgcgcgacaaggaagacttcggagcggtcccagccacgtggaaggcgccagcccatccctaaagatcggcgctccactggcaaatcctggggaaaaccaggatacccctggcccctatacgggaatgagggactcggctgggcaggatggctcctgtccccccgaggttcccgtccctcttggggccccaatgacccccggcataggtcgcgcaacgtgggtaaggtcatcgataccctaacgtgcggctttgccgacctcatggggtacatccctgtcgtgggcgccccgctcggcggcgtcgccagagctctcgcgcatggcgtgagagtcctggaggacggggttaattttgcaacagggaacttacccggttgctccttttctatcttcttgctggccctgctgtcctgcatcaccaccccggtctccgctgccgaagtgaagaacatcagtaccggctacatggtgactaacgactgcaccaatgacagcattacctggcagctccaggctgctgtcctccacgtccccgggtgcgtcccgtgcgagaaagtggggaatgcatctcagtgctggataccggtctcaccgaatgtggccgtgcagcggcccggcgccctcacgcagggcttgcggacgcacatcgacatggttgtgatgtccgccacgctctgctctgccctctacgtgggggacctctgcggtggggtgatgctcgcagcccaaatgttcattgtctcgccgcagcaccactggtttgtccaagactgcaattgctccatctaccctggtaccatcactggacaccgcatggcatgggacatgatgatgaactggtcgcccacggctaccatgatcttggcgtacgcgatgcgtgtccccgaggtcattatagacatcattagcggggctcattggggcgtcatgttcggcttggcctacttctctatgcagggagcgtgggcgaaagtcgttgtcatccttctgttggccgccggggtggacgcgcgcacccatactgttgggggttctgccgcgcagaccaccgggcgcctcaccagcttatttgacatgggccccaggcagaaaatccagctcgttaacaccaatggcagctggcacatcaaccgcaccgccctgaactgcaatgactccttgcacaccggctttatcgcgtctctgttctacacccacagcttcaactcgtcaggatgtcccgaacgcatgtccgcctgccgcagtatcgaggccttccgggtgggatggggcgccttgcaatatgaggataatgtcaccaatccagaggatatgagaccctattgctggcactacccaccaaggcagtgtggcgtggtctccgcgaagactgtgtgtggcccagtgtactgtttcacccccagcccagtggtagtgggcacgaccgacaggcttggagcgcccacttacacgtggggggagaatgagacagatgtcttcctattgaacagcactcgaccaccgctggggtcatggttcggctgcacgtggatgaactcttctggctacaccaagacttgcggcgcaccaccctgccgtactagagctgacttcaacgccagcacggacctgttgtgccccacggactgttttaggaagcatcctgataccacttacctcaaatgcggctctgggccctggctcacgccaaggtgcctgatcgactacccctacaggctctggcattacccctgcacagttaactataccatcttcaaaataaggatgtatgtgggaggggttgagcacaggctcacggctgcatgcaatttcactcgtggggatcgttgcaacttggaggacagagacagaagtcaactgtctcctttgttgcactccaccacggaatgggccattttaccttgctcttactcggacctgcccgccttgtcgactggtcttctccacctccaccaaaacatcgtggacgtacaattcatgtatggcctatcacctgccctcacaaaatacatcgtccgatgggagtgggtaatactcttattcctgctcttagcggacgccagggtttgcgcctgcttatggatgctcatcttgttgggccaggccgaagcagcactagagaagctggtcatcttgcacgctgcgagcgcagctagctgcaatggcttcctatattttgtcatctttttcgtggctgcttggtacatcaagggtcgggtagtccccttagctacctattccctcactggcctgtggtcctttagcctactgctcctagcattgccccaacaggcttatgcttatgacgcatctgtgcatggccagataggagcggctctgctggtaatgatcaccctcttcacactcaccccggggtataagaccctcctcggccagtgtctgtggtggttgtgctatctcctgaccctgggggaagccatgattcaggagtgggtaccacccatgcaggtgcgcggcggccgcgatggcatcgcgtgggccgtcactatattctgcccgggtgtggtgtttgacattaccaaatggcttttggcgttgcttgggcctgcttacctcttaagggccgctttgacacatgtgccgtacttcgtcagagctcacgctctgataagggtatgcgctttggtgaagcagctcgcggggggtaggtatgttcaggtggcgctattggcccttggcaggtggactggcacctacatctatgaccacctcacacctatgtcggactgggccgctagcggcctgcgcgacttagcggtcgccgtggaacccatcatcttcagtccgatggagaagaaggtcatcgtctggggagcggagacggctgcatgtggggacattctacatggacttcccgtgtccgcccgactcggccaggagatcctcctcggcccagctgatggctacacctccaaggggtggaagctccttgcgcctatcactgcttatgcccagcagacacgaggcctattgggcgccatagtggtgagcatgacgggccgtgacaagacagaacaggccggggagatccaggtcctctccacagtcactcaaaccttcctcgggactaccatctcaggagtcttgtggaccgtctaccacggggctggcaacaagaccctagccggctcgcggggcccggtcacacagatgtactccagcgccgagggagacttggtagggtggcccagtcctcccgggactaaatccatggagccgtgcacgtgcggagcggtcgacctgtacctggtcacgcggaacgctgacgtcatcccggctcggagacgcggggacaagcggggagcgttgctctccccgagacctctctcaactctgaaggggtcttcggggggaccggtgctctgccccaggggccacgttgtcgggatcttccgggcagccatatgctcgcggggcgtggccaagtccatagatttcatccccgttgaggcaattgacatcgtcacgcgctcccccacctttactgacaacagcacgccaccggctgtgccccagacctatcaggttggatacttgcacgccccgactggcagcgggaagagcaccaaagtccctgtcgcatatgccgcccaggggtataaggtgctagtgctcaatccctcggtggccgccaccttggggtttggggcgtacttggccaaggcgcacggcatcaatcctaacattaggactggagtcaggactgtgacgaccggggaggctattacgtattccacgtatggcaagtttctcgctgatgggggctgcgcaggcggcgcctatgacatcatcatatgcgatgagtgccatgccacggatgctaccacccttctcggcatcggaacagttcttgaccaagcagagtcagctggggtcaggctaactgtgctggccacggctacgcctcccggatcaataacaacccctcaccccaacatagaggaggtagctctcggacaggagggtgagatccccttctatgggagagcgatccccctggcccacatcaagggagggaggcacctgatcttctgccactcgaagaaaaagtgtgacgagctcgcggcggccctccgggccatgggcttgaacgctgtggcatactacagagggttggacgtctccataataccagctcaaggagacgtggtggttgtcgccactgacgccctcatgacagggtacactggagactttgactccgtgattgactgcaacgtagcggttactcaagtcgtggacttcagcttggaccccaccttcaccatatccacacaaaccgtcccccaagacgccgtctcacgcagccagcgccgggggcgcacgggcagagggagactgggcatttacaggtacgtttccactggtgagcgagcttcgggaatgtttgacagcgtaacgctctgcgagtgctacgatgcaggggctgcatggtatgatctcacaccagcggaaaccaccgtcaggcttagggcgtatttcaacacgcccggcctgcccgtgtgccaagaccacctcgagttttgggaggcagttttcaccggcctcacacacatagatgcccactacctttcccaaacaaagcaagcgggggagaatttcgcatacctgacagcctatcaggccacagtgtgtgccagagccaaagcccctcccccgtcttgggacgtcatgtggaagtgcctgactcgactcaaacccacgctcgtgggccccacacctctcctgtaccgcctgggttcagttaccaacgatgtcaccttcacacaccctgtgacaaagtacatcgctacttgcatgcaagctgacctcgaggtcatgaccagcacgtgggtcctagccgggggagtcctggctgccatcgccgcgtactgcttggcgactgggtgtgtttccatcatcggccgtttgcacgtcaaccagcgaaccgtcgttgcacctgacaaggaggtcctctatgaggcttttgacgagatggaggagtgtgcttccagagcggccctcattgaggaggcgcaacggatagccgagatgctgaagtctaagatccaaggcttattgcagcaggcttccaagcaggcccaggacatacaaccaaccgtgcaggcttcatggcccaaggtggagcaattctgggccaaacacatgtggaacttcattagcggcatccaatatcttgcgggactgtcaacgctgccagggaaccccgctgtggcctctatgatggcattcagtgccgccatcaccagtccgctgtcgactagcaccaccatccttctcaacatcatgggaggctggctggcgtctcaaattgcgccacccgcaggggccacaggcttcgtggtcagtggcctggtgggggctgccataggcagcgtaggcttgggtaaggtgctggtggacatcttggcagggtacggtgcgggcatttcgggggctctcgtcgcattcaagatcatgtctggcgagaagccctccatggaggatgtcatcaacctgctgcccggaatcctgtccccgggcgccctggtggtgggggtcatttgcgcggccattctgcgccgtcatgtgggaccgggggaaggtgcggtccaatggatgaataggcttattgcctttgcttccagaggaaaccacgtcgcccccacccactatgtgacggagtcagatgcgtcgcagcgcgtgacccaactacttggctctctcaccataactagcctgcttagaaggctccacaattggattactgaggactgccccaccccatgcaatggctcatggctccgcgatgtgtgggactgggtgtgcaccatcctgactgactttaaaaactggctgacctccaagttgttcccaaagctgcccggcctccccttcatctcttgccaaaaggggtataggggcgactgggccggcacgggcatcatggtcacgcggtgcccttgtggcgccaacatttctggcaatgtccgcttcggctctatgagaatcacagggcctaagacctgcatgaacacctggcaggggactttccctatcaactgctacacggagggccaatgcatgccgagacctgcgccaaactttaagaccgccatctggagggtggcggcctcagagtacgcggaggtgacgcggcacgggtcgtactcttacataacagggctgaccgctgacaatctgaaggttccctgccaaataccatctccagagttcttttcctgggtagacggagtacagatccacaggtttgctcccactccaaagccgttctttcgggatgaggtctcgttcagcgtggggctcaactcatttgtagtcgggtctcagcttccctgcgaccctgaacccgacgcggacgtgttgatgtccatgctaacagatcctggccatatcacggcagaggctgcagcgcggcgcttagcgcgggggtcacccccatctgaggcaagctcctcagcaagccagctgtcggccccgtcgctgcgttccaccagtgccacccacggcacggcctatgatgtggccatggtggatgctaacctgttcatgaagggggaagtgattcggatagagtccgattccaaagtggtcgttctggactctctcgacccactggccgaagaggtgagcgacgtcgaaccctctataccatcagagtacttgatccccaagaaacaattcccaccagccttgccggcctgggcgcggcctgactacaacccaccgcttgtggaatcgtggaggaagcctgactaccaaccacccactgtcgcgggctgtgctctccccccccccaagaagaccccgacgccccccccaaggaagcgtcggacggtgagactcagtgagagcgccgtgggagacatcctccaacagctggctattaagacctttggccagccccctccaagcggaggcccagacccccccacgggggcgggcgccgccggctccggcggtcagacgccccctgatgagccggctccttcggagacggattctgtctcctccatgcccccccttgagggggagcccggagacccagacctggagcttggccaggtagagccccaaccccccccccaggggggggaggcggctcccgactcagactctgggtcgtggtctacctgctccgaggaggaggattccaccgtgtgctgctccatgtcatactcctggaccggggcccttataactccttgcagccccgaagaggagaagttgccaatcaatcccctgagcaactcattgttgcgctaccacaacaaggtgtactgcactacatcaagaagtgcgtcactgagggccaaaaaggtaacttttgacaggatgcaagtactcgatgcccactatgactcagtcttaaaggacattaagctagcggcctccaaggtcagcgcaaggtccctcagcttggaggaggcgtgcaagctgaccccgccccactctgcgaggtccaaatatggatttggggctaaggaggtccgcagcttgtccgggagggccgtcaaccacatcaagtccgtgtggaaggacctcttggaagactcacaaacaccaatacctacaaccatcatggccaagaatgaggtgttctgcgtgaaccctgctaaggggggcaagaaagcagctcgcctcatcgtttaccccgaccttggtgtcagggtctgcgaaaagatggccctctatgatgttgcacaaaagcttcctcaggcggtgatgggggcctcctatgggttccagtactctcccgcccagcgggtggagtttctcttgaaagcgtgggcggacaagaaagaccctatgggtttttcgtatgatacccgatgctttgactcaactgtcactgagagagacataagaactgaggaggacatatacctgtcctgctccctacccgaggaggcccgcactgccacacactcgctgactgagagactttacgtgggagggcccatgttcaacagcaagggccagacctgcgggtacaggcgttgccgcgctagcggggtgctcaccactagcatggggaataccatcacatgctatgtaaaagccctagcggcctgcaaggccgcagggatagttgcacccacgatgctggtatgcggcgatgacttggttgtcatctcagaaagccaggggactgaggaggacgagcggaacctgagagccttcacggaggctatgaccaggtattctgcccctcctggtgacccccccagaccggaatacgacttggagctgataacatcctgctcctcaaatgtgtctgtggcacttggcccccggggcaaccgcagatactatctgaccagagaccccaccactccaatcgcccgggctgcctgggaaacagtcagacactcccctgtcaattcatggctgggaaacatcatccagtacgctccaaccatatgggttcgtatggtcctgatgacacatttctactccattctcatggcccaagacactctggaccagaaccttaactttgaaatgtatggagctgtgtactctgtaagtcccttggacctcccagccataattgaaaagctccatgggcttgacgctttctctctgcacacatactctcccaacgaactgacgcgagtggcttcagccctcagaaaacttggggcgccacccctcagagcgtggaagagccgggcgcgtgcagtcagagcgtccctcatctcccgtggagggagagcggccgtctgcggtcgatatctcttcaactgggcggtgaagaccaagctcaaactcactccattgccggaggcgcgccatctggatttatccagttggttcaccgtcggcgccggcgggggcgacatttatcacagcgtgtcgcgtgcccgaccccgcttgttactccttagcctactcctactctttgtaggagtaggccttttcctactccccgctcggtagagcggcacacattagctacactccatagctaactgttccattttttttttttttttttttttttttttttttttttttttttttttttttttttttttttttcttttccttcctttctttttcactttacttcattctttcctggtggctccatcttagccctagtcacggctagctgtgaaaggtccgtgagccgcatgactgcagagagtgccgtaactggtctctctgcagatcatgt

SEQ ID NO: 79 - DNA, 9530 bp, Artificial Sequence
  synthetic DNA: J6/JFH-2.1 A2217S(LP)
accggtgagtacaccggaattgccgggaagactgggtcctttcttggataaacccactctatgcccggccatttgggcgtgcccccgcaagactgctagccgagtagcgttgggttgcgaaaggccttgtggtactgcctgatagggtgcttgcgagtgccccgggaggtctcgtagaccgtgcaccatgagcacaaatcctaaacctcaaagaaaaaccaaaagaaacaccaaccgtcgcccacaagacgttaagtttccgggcggcggccagatcgttggcggagtatacttgttgccgcgcaggggccccaggttgggtgtgcgcgcgacaaggaagacttcggagcggtcccagccacgtggaaggcgccagcccatccctaaagatcggcgctccactggcaaatcctggggaaaaccaggatacccctggcccctatacgggaatgagggactcggctgggcaggatggctcctgtccccccgaggttcccgtccctcttggggccccaatgacccccggcataggtcgcgcaacgtgggtaaggtcatcgataccctaacgtgcggctttgccgacctcatggggtacatccctgtcgtgggcgccccgctcggcggcgtcgccagagctctcgcgcatggcgtgagagtcctggaggacggggttaattttgcaacagggaacttacccggttgctccttttctatcttcttgctggccctgctgtcctgcatcaccaccccggtctccgctgccgaagtgaagaacatcagtaccggctacatggtgactaacgactgcaccaatgacagcattacctggcagctccaggctgctgtcctccacgtccccgggtgcgtcccgtgcgagaaagtggggaatgcatctcagtgctggataccggtctcaccgaatgtggccgtgcagcggcccggcgccctcacgcagggcttgcggacgcacatcgacatggttgtgatgtccgccacgctctgctctgccctctacgtgggggacctctgcggtggggtgatgctcgcagcccaaatgttcattgtctcgccgcagcaccactggtttgtccaagactgcaattgctccatctaccctggtaccatcactggacaccgcatggcatgggacatgatgatgaactggtcgcccacggctaccatgatcttggcgtacgcgatgcgtgtccccgaggtcattatagacatcattagcggggctcattggggcgtcatgttcggcttggcctacttctctatgcagggagcgtgggcgaaagtcgttgtcatccttctgttggccgccggggtggacgcgcgcacccatactgttgggggttctgccgcgcagaccaccgggcgcctcaccagcttatttgacatgggccccaggcagaaaatccagctcgttaacaccaatggcagctggcacatcaaccgcaccgccctgaactgcaatgactccttgcacaccggctttatcgcgtctctgttctacacccacagcttcaactcgtcaggatgtcccgaacgcatgtccgcctgccgcagtatcgaggccttccgggtgggatggggcgccttgcaatatgaggataatgtcaccaatccagaggatatgagaccctattgctggcactacccaccaaggcagtgtggcgtggtctccgcgaagactgtgtgtggcccagtgtactgtttcacccccagcccagtggtagtgggcacgaccgacaggcttggagcgcccacttacacgtggggggagaatgagacagatgtcttcctattgaacagcactcgaccaccgctggggtcatggttcggctgcacgtggatgaactcttctggctacaccaagacttgcggcgcaccaccctgccgtactagagctgacttcaacgccagcacggacctgttgtgccccacggactgttttaggaagcatcctgataccacttacctcaaatgcggctctgggccctggctcacgccaaggtgcctgatcgactacccctacaggctctggcattacccctgcacagttaactataccatcttcaaaataaggatgtatgtgggaggggttgagcacaggctcacggctgcatgcaatttcactcgtggggatcgttgcaacttggaggacagagacagaagtcaactgtctcctttgttgcactccaccacggaatgggccattttaccttgctcttactcggacctgcccgccttgtcgactggtcttctccacctccaccaaaacatcgtggacgtacaattcatgtatggcctatcacctgccctcacaaaatacatcgtccgatgggagtgggtaatactcttattcctgctcttagcggacgccagggtttgcgcctgcttatggatgctcatcttgttgggccaggccgaagcagcactagagaagctggtcatcttgcacgctgcgagcgcagctagctgcaatggcttcctatattttgtcatctttttcgtggctgcttggtacatcaagggtcgggtagtccccttagctacctattccctcactggcctgtggtcctttagcctactgctcctagcattgccccaacaggcttatgcttatgacgcatctgtgcatggccagataggagcggctctgctggtaatgatcaccctcttcacactcaccccggggtataagaccctcctcggccagtgtctgtggtggttgtgctatctcctgaccctgggggaagccatgattcaggagtgggtaccacccatgcaggtgcgcggcggccgcgatggcatcgcgtgggccgtcactatattctgcccgggtgtggtgtttgacattaccaaatggcttttggcgttgcttgggcctgcttacctcttaagggccgctttgacacatgtgccgtacttcgtcagagctcacgctctgataagggtatgcgctttggtgaagcagctcgcggggggtaggtatgttcaggtggcgctattggcccttggcaggtggactggcacctacatctatgaccacctcacacctatgtcggactgggccgctagcggcctgcgcgacttagcggtcgccgtggaacccatcatcttcagtccgatggagaagaaggtcatcgtctggggagcggagacggctgcatgtggggacattctacatggacttcccgtgtccgcccgactcggccaggagatcctcctcggcccagctgatggctacacctccaaggggtggaagctccttgcgcctatcactgcttatgcccagcagacacgaggcctattgggcgccatagtggtgagcatgacgggccgtgacaagacagaacaggccggggagatccaggtcctctccacagtcactcaaaccttcctcgggactaccatctcaggagtcttgtggaccgtctaccacggggctggcaacaagaccctagccggctcgcggggcccggtcacacagatgtactccagcgccgagggagacttggtagggtggcccagtcctcccgggactaaatccatggagccgtgcacgtgcggagcggtcgacctgtacctggtcacgcggaacgctgacgtcatcccggctcggagacgcggggacaagcggggagcgttgctctccccgagacctctctcaactctgaaggggtcttcggggggaccggtgctctgccccaggggccacgttgtcgggatcttccgggcagccatatgctcgcggggcgtggccaagtccatagatttcatccccgttgaggcaattgacatcgtcacgcgctcccccacctttactgacaacagcacgccaccggctgtgccccagacctatcaggttggatacttgcacgccccgactggcagcgggaagagcaccaaagtccctgtcgcatatgccgcccaggggtataaggtgctagtgctcaatccctcggtggccgccaccttggggtttggggcgtacttggccaaggcgcacggcatcaatcctaacattaggactggagtcaggactgtgacgaccggggaggctattacgtattccacgtatggcaagtttctcgctgatgggggctgcgcaggcggcgcctatgacatcatcatatgcgatgagtgccatgccacggatgctaccacccttctcggcatcggaacagttcttgaccaagcagagtcagctggggtcaggctaactgtgctggccacggctacgcctcccggatcaataacaacccctcaccccaacatagaggaggtagctctcggacaggagggtgagatccccttctatgggagagcgatccccctggcccacatcaagggagggaggcacctgatcttctgccactcgaagaaaaagtgtgacgagctcgcggcggccctccgggccatgggcttgaacgctgtggcatactacagagggttggacgtctccataataccagctcaaggagacgtggtggttgtcgccactgacgccctcatgacagggtacactggagactttgactccgtgattgactgcaacgtagcggttactcaagtcgtggacttcagcttggaccccaccttcaccatatccacacaaaccgtcccccaagacgccgtctcacgcagccagcgccgggggcgcacgggcagagggagactgggcatttacaggtacgtttccactggtgagcgagcttcgggaatgtttgacagcgtaacgctctgcgagtgctacgatgcaggggctgcatggtatgatctcacaccagcggaaaccaccgtcaggcttagggcgtatttcaacacgcccggcctgcccgtgtgccaagaccacctcgagttttgggaggcagttttcaccggcctcacacacatagatgcccactacctttcccaaacaaagcaagcgggggagaatttcgcatacctgacagcctatcaggccacagtgtgtgccagagccaaagcccctcccccgtcttgggacgtcatgtggaagtgcctgactcgactcaaacccacgctcgtgggccccacacctctcctgtaccgcctgggttcagttaccaacgatgtcaccttcacacaccctgtgacaaagtacatcgctacttgcatgcaagctgacctcgaggtcatgaccagcacgtgggtcctagccgggggagtcctggctgccatcgccgcgtactgcttggcgactgggtgtgtttccatcatcggccgtttgcacgtcaaccagcgaaccgtcgttgcacctgacaaggaggtcctctatgaggcttttgacgagatggaggagtgtgcttccagagcggccctcattgaggaggcgcaacggatagccgagatgctgaagtctaagatccaaggcttattgcagcaggcttccaagcaggcccaggacatacaaccaaccgtgcaggcttcatggcccaaggtggagcaattctgggccaaacacatgtggaacttcattagcggcatccaatatcttgcgggactgtcaacgctgccagggaaccccgctgtggcctctatgatggcattcagtgccgccatcaccagtccgctgtcgactagcaccaccatccttctcaacatcatgggaggctggctggcgtctcaaattgcgccacccgcaggggccacaggcttcgtggtcagtggcctggtgggggctgccataggcagcgtaggcttgggtaaggtgctggtggacatcttggcagggtacggtgcgggcatttcgggggctctcgtcgcattcaagatcatgtctggcgagaagccctccatggaggatgtcatcaacctgctgcccggaatcctgtccccgggcgccctggtggtgggggtcatttgcgcggccattctgcgccgtcatgtgggaccgggggaaggtgcggtccaatggatgaataggcttattgcctttgcttccagaggaaaccacgtcgcccccacccactatgtgacggagtcagatgcgtcgcagcgcgtgacccaactacttggctctctcaccataactagcctgcttagaaggctccacaattggattactgaggactgccccaccccatgcaatggctcatggctccgcgatgtgtgggactgggtgtgcaccatcctgactgactttaaaaactggctgacctccaagttgttcccaaagctgcccggcctccccttcatctcttgccaaaaggggtataggggcgactgggccggcacgggcatcatggtcacgcggtgcccttgtggcgccaacatttctggcaatgtccgcttcggctctatgagaatcacagggcctaagacctgcatgaacacctggcaggggactttccctatcaactgctacacggagggccaatgcatgccgagacctgcgccaaactttaagaccgccatctggagggtggcggcctcagagtacgcggaggtgacgcggcacgggtcgtactcttacataacagggctgaccgctgacaatctgaaggttccctgccaaataccatctccagagttcttttcctgggtagacggagtacagatccacaggtttgctcccactccaaagccgttctttcgggatgaggtctcgttcagcgtggggctcaactcatttgtagtcgggtctcagcttccctgcgaccctgaacccgacgcggacgtgttgatgtccatgctaacagatcctggccatatcacggcagaggctgcagcgcggcgcttagcgcgggggtcacccccatctgaggcaagctcctcagcaagccagctgtcggccccgtcgctgcgttccacctgtgccacccacggcacggcctatgatgtggccatggtggatgctaacctgttcatgaagggggaagtgattcggatagagtccgattccaaagtggtcgttctggactctctcgacccactggccgaagaggtgagcgacgtcgaaccctctataccatcagagtacttgatccccaagaaacaattcccaccagccttgccggcctgggcgcggcctgactacaacccaccgcttgtggaatcgtggaggaagcctgactaccaaccacccactgtcgcgggctgtgctctccccccccccaagaagaccccgacgccccccccaaggaagcgtcggacggtgagactcagtgagagcgccgtgggagacatcctccaacagctggctattaagacctttggccagccccctccaagcggaggcccagacccccccacgggggcgggcgccgccggctccggcggtcagacgccccctgatgagccggctccttcggagacggattctgtctcctccatgcccccccttgagggggagcccggagacccagacctggagcttggccaggtagagccccaaccccccccccaggggggggaggcggctcccgactcagactctgggtcgtggtctacctgctccgaggaggaggattccaccgtgtgctgctccatgtcatactcctggaccggggcccttataactccttgcagccccgaagaggagaagttgccaatcaatcccctgagcaactcattgttgcgctaccacaacaaggtgtactgcactacatcaagaagtgcgtcactgagggccaaaaaggtaacttttgacaggatgcaagtactcgatgcccactatgactcagtcttaaaggacattaagctagcggcctccaaggtcagcgcaaggtccctcagcttggaggaggcgtgcaagctgaccccgccccactctgcgaggtccaaatatggatttggggctaaggaggtccgcagcttgtccgggagggccgtcaaccacatcaagtccgtgtggaaggacctcttggaagactcacaaacaccaatacctacaaccatcatggccaagaatgaggtgttctgcgtgaaccctgctaaggggggcaagaaagcagctcgcctcatcgtttaccccgaccttggtgtcagggtctgcgaaaagatggccctctatgatgttgcacaaaagcttcctcaggcggtgatgggggcctcctatgggttccagtactctcccgcccagcgggtggagtttctcttgaaagcgtgggcggacaagaaagaccctatgggtttttcgtatgatacccgatgctttgactcaactgtcactgagagagacataagaactgaggaggacatatacctgtcctgctccctacccgaggaggcccgcactgccacacactcgctgactgagagactttacgtgggagggcccatgttcaacagcaagggccagacctgcgggtacaggcgttgccgcgctagcggggtgctcaccactagcatggggaataccatcacatgctatgtaaaagccctagcggcctgcaaggccgcagggatagttgcacccacgatgctggtatgcggcgatgacttggttgtcatctcagaaagccaggggactgaggaggacgagcggaacctgagagccttcacggaggctatgaccaggtattctgcccctcctggtgacccccccagaccggaatacgacttggagctgataacatcctgctcctcaaatgtgtctgtggcacttggcccccggggcaaccgcagatactatctgaccagagaccccaccactccaatcgcccgggctgcctgggaaacagtcagacactcccctgtcaattcatggctgggaaacatcatccagtacgctccaaccatatgggttcgtatggtcctgatgacacatttctactccattctcatggcccaagacactctggaccagaaccttaactttgaaatgtatggagctgtgtactctgtaagtcccttggacctcccagccataattgaaaagctccatgggcttgacgctttctctctgcacacatactctcccaacgaactgacgcgagtggcttcagccctcagaaaacttggggcgccacccctcagagcgtggaagagccgggcgcgtgcagtcagagcgtccctcatctcccgtggagggagagcggccgtctgcggtcgatatctcttcaactgggcggtgaagaccaagctcaaactcactccattgccggaggcgcgccatctggatttatccagttggttcaccgtcggcgccggcgggggcgacatttatcacagcgtgtcgcgtgcccgaccccgcttgttactccctagcctactcctactctttgtaggagtaggccttttcctactccccgctcggtagagcggcacacattagctacactccatagctaactgttccattttttttttttttttttttttttttttttttttttttttttttttttttttttttttttttcttttccttcctttctttttcactttacttcattctttcctggtggctccatcttagccctagtcacggctagctgtgaaaggtccgtgagccgcatgactgcagagagtgccgtaactggtctctctgcagatcatgt

SEQ ID NO: 80 - DNA, 9530 bp, Artificial Sequence
  synthetic DNA: J6/JFH-2.1 A2217S(TI)
accggtgagtacaccggaattgccgggaagactgggtcctttcttggataaacccactctatgcccggccatttgggcgtgcccccgcaagactgctagccgagtagcgttgggttgcgaaaggccttgtggtactgcctgatagggtgcttgcgagtgccccgggaggtctcgtagaccgtgcaccatgagcacaaatcctaaacctcaaagaaaaaccaaaagaaacaccaaccgtcgcccacaagacgttaagtttccgggcggcggccagatcgttggcggagtatacttgttgccgcgcaggggccccaggttgggtgtgcgcgcgacaaggaagacttcggagcggtcccagccacgtggaaggcgccagcccatccctaaagatcggcgctccactggcaaatcctggggaaaaccaggatacccctggcccctatacgggaatgagggactcggctgggcaggatggctcctgtccccccgaggttcccgtccctcttggggccccaatgacccccggcataggtcgcgcaacgtgggtaaggtcatcgataccctaacgtgcggctttgccgacctcatggggtacatccctgtcgtgggcgccccgctcggcggcgtcgccagagctctcgcgcatggcgtgagagtcctggaggacggggttaattttgcaacagggaacttacccggttgctccttttctatcttcttgctggccctgctgtcctgcatcaccaccccggtctccgctgccgaagtgaagaacatcagtaccggctacatggtgactaacgactgcaccaatgacagcattacctggcagctccaggctgctgtcctccacgtccccgggtgcgtcccgtgcgagaaagtggggaatgcatctcagtgctggataccggtctcaccgaatgtggccgtgcagcggcccggcgccctcacgcagggcttgcggacgcacatcgacatggttgtgatgtccgccacgctctgctctgccctctacgtgggggacctctgcggtggggtgatgctcgcagcccaaatgttcattgtctcgccgcagcaccactggtttgtccaagactgcaattgctccatctaccctggtaccatcactggacaccgcatggcatgggacatgatgatgaactggtcgcccacggctaccatgatcttggcgtacgcgatgcgtgtccccgaggtcattatagacatcattagcggggctcattggggcgtcatgttcggcttggcctacttctctatgcagggagcgtgggcgaaagtcgttgtcatccttctgttggccgccggggtggacgcgcgcacccatactgttgggggttctgccgcgcagaccaccgggcgcctcaccagcttatttgacatgggccccaggcagaaaatccagctcgttaacaccaatggcagctggcacatcaaccgcaccgccctgaactgcaatgactccttgcacaccggctttatcgcgtctctgttctacacccacagcttcaactcgtcaggatgtcccgaacgcatgtccgcctgccgcagtatcgaggccttccgggtgggatggggcgccttgcaatatgaggataatgtcaccaatccagaggatatgagaccctattgctggcactacccaccaaggcagtgtggcgtggtctccgcgaagactgtgtgtggcccagtgtactgtttcacccccagcccagtggtagtgggcacgaccgacaggcttggagcgcccacttacacgtggggggagaatgagacagatgtcttcctattgaacagcactcgaccaccgctggggtcatggttcggctgcacgtggatgaactcttctggctacaccaagacttgcggcgcaccaccctgccgtactagagctgacttcaacgccagcacggacctgttgtgccccacggactgttttaggaagcatcctgataccacttacctcaaatgcggctctgggccctggctcacgccaaggtgcctgatcgactacccctacaggctctggcattacccctgcacagttaactataccatcttcaaaataaggatgtatgtgggaggggttgagcacaggctcacggctgcatgcaatttcactcgtggggatcgttgcaacttggaggacagagacagaagtcaactgtctcctttgttgcactccaccacggaatgggccattttaccttgctcttactcggacctgcccgccttgtcgactggtcttctccacctccaccaaaacatcgtggacgtacaattcatgtatggcctatcacctgccctcacaaaatacatcgtccgatgggagtgggtaatactcttattcctgctcttagcggacgccagggtttgcgcctgcttatggatgctcatcttgttgggccaggccgaagcagcactagagaagctggtcatcttgcacgctgcgagcgcagctagctgcaatggcttcctatattttgtcatctttttcgtggctgcttggtacatcaagggtcgggtagtccccttagctacctattccctcactggcctgtggtcctttagcctactgctcctagcattgccccaacaggcttatgcttatgacgcatctgtgcatggccagataggagcggctctgctggtaatgatcaccctcttcacactcaccccggggtataagaccctcctcggccagtgtctgtggtggttgtgctatctcctgaccctgggggaagccatgattcaggagtgggtaccacccatgcaggtgcgcggcggccgcgatggcatcgcgtgggccgtcactatattctgcccgggtgtggtgtttgacattaccaaatggcttttggcgttgcttgggcctgcttacctcttaagggccgctttgacacatgtgccgtacttcgtcagagctcacgctctgataagggtatgcgctttggtgaagcagctcgcggggggtaggtatgttcaggtggcgctattggcccttggcaggtggactggcacctacatctatgaccacctcacacctatgtcggactgggccgctagcggcctgcgcgacttagcggtcgccgtggaacccatcatcttcagtccgatggagaagaaggtcatcgtctggggagcggagacggctgcatgtggggacattctacatggacttcccgtgtccgcccgactcggccaggagatcctcctcggcccagctgatggctacacctccaaggggtggaagctccttgcgcctatcactgcttatgcccagcagacacgaggcctattgggcgccatagtggtgagcatgacgggccgtgacaagacagaacaggccggggagatccaggtcctctccacagtcactcaaaccttcctcgggactaccatctcaggagtcttgtggaccgtctaccacggggctggcaacaagaccctagccggctcgcggggcccggtcacacagatgtactccagcgccgagggagacttggtagggtggcccagtcctcccgggactaaatccatggagccgtgcacgtgcggagcggtcgacctgtacctggtcacgcggaacgctgacgtcatcccggctcggagacgcggggacaagcggggagcgttgctctccccgagacctctctcaactctgaaggggtcttcggggggaccggtgctctgccccaggggccacgttgtcgggatcttccgggcagccatatgctcgcggggcgtggccaagtccatagatttcatccccgttgaggcaattgacatcgtcacgcgctcccccacctttactgacaacagcacgccaccggctgtgccccagacctatcaggttggatacttgcacgccccgactggcagcgggaagagcaccaaagtccctgtcgcatatgccgcccaggggtataaggtgctagtgctcaatccctcggtggccgccaccttggggtttggggcgtacttggccaaggcgcacggcatcaatcctaacattaggactggagtcaggactgtgacgaccggggaggctattacgtattccacgtatggcaagtttctcgctgatgggggctgcgcaggcggcgcctatgacatcatcatatgcgatgagtgccatgccacggatgctaccacccttctcggcatcggaacagttcttgaccaagcagagtcagctggggtcaggctaactgtgctggccacggctacgcctcccggatcaataacaacccctcaccccaacatagaggaggtagctctcggacaggagggtgagatccccttctatgggagagcgatccccctggcccacatcaagggagggaggcacctgatcttctgccactcgaagaaaaagtgtgacgagctcgcggcggccctccgggccatgggcttgaacgctgtggcatactacagagggttggacgtctccataataccagctcaaggagacgtggtggttgtcgccactgacgccctcatgacagggtacactggagactttgactccgtgattgactgcaacgtagcggttactcaagtcgtggacttcagcttggaccccaccttcaccatatccacacaaaccgtcccccaagacgccgtctcacgcagccagcgccgggggcgcacgggcagagggagactgggcatttacaggtacgtttccactggtgagcgagcttcgggaatgtttgacagcgtaacgctctgcgagtgctacgatgcaggggctgcatggtatgatctcacaccagcggaaaccaccgtcaggcttagggcgtatttcaacacgcccggcctgcccgtgtgccaagaccacctcgagttttgggaggcagttttcaccggcctcacacacatagatgcccactacctttcccaaacaaagcaagcgggggagaatttcgcatacctgacagcctatcaggccacagtgtgtgccagagccaaagcccctcccccgtcttgggacgtcatgtggaagtgcctgactcgactcaaacccacgctcgtgggccccacacctctcctgtaccgcctgggttcagttaccaacgatgtcaccttcacacaccctgtgacaaagtacatcgctacttgcatgcaagctgacctcgaggtcatgaccagcacgtgggtcctagccgggggagtcctggctgccatcgccgcgtactgcttggcgactgggtgtgtttccatcatcggccgtttgcacgtcaaccagcgaaccgtcgttgcacctgacaaggaggtcctctatgaggcttttgacgagatggaggagtgtgcttccagagcggccctcattgaggaggcgcaacggatagccgagatgctgaagtctaagatccaaggcttattgcagcaggcttccaagcaggcccaggacatacaaccaaccgtgcaggcttcatggcccaaggtggagcaattctgggccaaacacatgtggaacttcattagcggcatccaatatcttgcgggactgtcaacgctgccagggaaccccgctgtggcctctatgatggcattcagtgccgccatcaccagtccgctgtcgactagcaccaccatccttctcaacatcatgggaggctggctggcgtctcaaattgcgccacccgcaggggccacaggcttcgtggtcagtggcctggtgggggctgccataggcagcgtaggcttgggtaaggtgctggtggacatcttggcagggtacggtgcgggcatttcgggggctctcgtcgcattcaagatcatgtctggcgagaagccctccatggaggatgtcatcaacctgctgcccggaatcctgtccccgggcgccctggtggtgggggtcatttgcgcggccattctgcgccgtcatgtgggaccgggggaaggtgcggtccaatggatgaataggcttattgcctttgcttccagaggaaaccacgtcgcccccacccactatgtgacggagtcagatgcgtcgcagcgcgtgacccaactacttggctctctcaccataactagcctgcttagaaggctccacaattggattactgaggactgccccaccccatgcaatggctcatggctccgcgatgtgtgggactgggtgtgcaccatcctgactgactttaaaaactggctgacctccaagttgttcccaaagctgcccggcctccccttcatctcttgccaaaaggggtataggggcgactgggccggcacgggcatcatggtcacgcggtgcccttgtggcgccaacatttctggcaatgtccgcttcggctctatgagaatcacagggcctaagacctgcatgaacacctggcaggggactttccctatcaactgctacacggagggccaatgcatgccgagacctgcgccaaactttaagaccgccatctggagggtggcggcctcagagtacgcggaggtgacgcggcacgggtcgtactcttacataacagggctgaccgctgacaatctgaaggttccctgccaaataccatctccagagttcttttcctgggtagacggagtacagatccacaggtttgctcccactccaaagccgttctttcgggatgaggtctcgttcagcgtggggctcaactcatttgtagtcgggtctcagcttccctgcgaccctgaacccgacgcggacgtgttgatgtccatgctaacagatcctggccatatcacggcagaggctgcagcgcggcgcttagcgcgggggtcacccccatctgaggcaagctcctcagcaagccagctgtcggccccgtcgctgcgttccacctgtgccacccacggcacggcctatgatgtggccatggtggatgctaacctgttcatgaagggggaagtgattcggatagagtccgattccaaagtggtcgttctggactctctcgacccactggccgaagaggtgagcgacgtcgaaccctctataccatcagagtacttgatccccaagaaacaattcccaccagccttgccggcctgggcgcggcctgactacaacccaccgcttgtggaatcgtggaggaagcctgactaccaaccacccactgtcgcgggctgtgctctccccccccccaagaagaccccgacgccccccccaaggaagcgtcggacggtgagactcagtgagagcgccgtgggagacatcctccaacagctggctattaagacctttggccagccccctccaagcggaggcccagacccccccacgggggcgggcgccgccggctccggcggtcagacgccccctgatgagccggctccttcggagacggattctgtctcctccatgcccccccttgagggggagcccggagacccagacctggagcttggccaggtagagccccaaccccccccccaggggggggaggcggctcccgactcagactctgggtcgtggtctacctgctccgaggaggaggattccaccgtgtgctgctccatgtcatactcctggaccggggcccttataactccttgcagccccgaagaggagaagttgccaatcaatcccctgagcaactcattgttgcgctaccacaacaaggtgtactgcactacatcaagaagtgcgtcactgagggccaaaaaggtaacttttgacaggatgcaagtactcgatgcccactatgactcagtcttaaaggacattaagctagcggcctccaaggtcagcgcaaggtccctcagcttggaggaggcgtgcaagctgaccccgccccactctgcgaggtccaaatatggatttggggctaaggaggtccgcagcttgtccgggagggccgtcaaccacatcaagtccgtgtggaaggacctcttggaagactcacaaacaccaatacctacaaccatcatggccaagaatgaggtgttctgcgtgaaccctgctaaggggggcaagaaagcagctcgcctcatcgtttaccccgaccttggtgtcagggtctgcgaaaagatggccctctatgatgttgcacaaaagcttcctcaggcggtgatgggggcctcctatgggttccagtactctcccgcccagcgggtggagtttctcttgaaagcgtgggcggacaagaaagaccctatgggtttttcgtatgatacccgatgctttgactcaactgtcactgagagagacataagaactgaggaggacatatacctgtcctgctccctacccgaggaggcccgcactgccatacactcgctgactgagagactttacgtgggagggcccatgttcaacagcaagggccagacctgcgggtacaggcgttgccgcgctagcggggtgctcaccactagcatggggaataccatcacatgctatgtaaaagccctagcggcctgcaaggccgcagggatagttgcacccacgatgctggtatgcggcgatgacttggttgtcatctcagaaagccaggggactgaggaggacgagcggaacctgagagccttcacggaggctatgaccaggtattctgcccctcctggtgacccccccagaccggaatacgacttggagctgataacatcctgctcctcaaatgtgtctgtggcacttggcccccggggcaaccgcagatactatctgaccagagaccccaccactccaatcgcccgggctgcctgggaaacagtcagacactcccctgtcaattcatggctgggaaacatcatccagtacgctccaaccatatgggttcgtatggtcctgatgacacatttctactccattctcatggcccaagacactctggaccagaaccttaactttgaaatgtatggagctgtgtactctgtaagtcccttggacctcccagccataattgaaaagctccatgggcttgacgctttctctctgcacacatactctcccaacgaactgacgcgagtggcttcagccctcagaaaacttggggcgccacccctcagagcgtggaagagccgggcgcgtgcagtcagagcgtccctcatctcccgtggagggagagcggccgtctgcggtcgatatctcttcaactgggcggtgaagaccaagctcaaactcactccattgccggaggcgcgccatctggatttatccagttggttcaccgtcggcgccggcgggggcgacatttatcacagcgtgtcgcgtgcccgaccccgcttgttactccttagcctactcctactctttgtaggagtaggccttttcctactccccgctcggtagagcggcacacattagctacactccatagctaactgttccattttttttttttttttttttttttttttttttttttttttttttttttttttttttttttttcttttccttcctttctttttcactttacttcattctttcctggtggctccatcttagccctagtcacggctagctgtgaaaggtccgtgagccgcatgactgcagagagtgccgtaactggtctctctgcagatcatgt

SEQ ID NO: 81 - DNA, 9530 bp, Artificial Sequence
  synthetic DNA: J6/JFH-2.1 A2217S(CS/LP)
accggtgagtacaccggaattgccgggaagactgggtcctttcttggataaacccactctatgcccggccatttgggcgtgcccccgcaagactgctagccgagtagcgttgggttgcgaaaggccttgtggtactgcctgatagggtgcttgcgagtgccccgggaggtctcgtagaccgtgcaccatgagcacaaatcctaaacctcaaagaaaaaccaaaagaaacaccaaccgtcgcccacaagacgttaagtttccgggcggcggccagatcgttggcggagtatacttgttgccgcgcaggggccccaggttgggtgtgcgcgcgacaaggaagacttcggagcggtcccagccacgtggaaggcgccagcccatccctaaagatcggcgctccactggcaaatcctggggaaaaccaggatacccctggcccctatacgggaatgagggactcggctgggcaggatggctcctgtccccccgaggttcccgtccctcttggggccccaatgacccccggcataggtcgcgcaacgtgggtaaggtcatcgataccctaacgtgcggctttgccgacctcatggggtacatccctgtcgtgggcgccccgctcggcggcgtcgccagagctctcgcgcatggcgtgagagtcctggaggacggggttaattttgcaacagggaacttacccggttgctccttttctatcttcttgctggccctgctgtcctgcatcaccaccccggtctccgctgccgaagtgaagaacatcagtaccggctacatggtgactaacgactgcaccaatgacagcattacctggcagctccaggctgctgtcctccacgtccccgggtgcgtcccgtgcgagaaagtggggaatgcatctcagtgctggataccggtctcaccgaatgtggccgtgcagcggcccggcgccctcacgcagggcttgcggacgcacatcgacatggttgtgatgtccgccacgctctgctctgccctctacgtgggggacctctgcggtggggtgatgctcgcagcccaaatgttcattgtctcgccgcagcaccactggtttgtccaagactgcaattgctccatctaccctggtaccatcactggacaccgcatggcatgggacatgatgatgaactggtcgcccacggctaccatgatcttggcgtacgcgatgcgtgtccccgaggtcattatagacatcattagcggggctcattggggcgtcatgttcggcttggcctacttctctatgcagggagcgtgggcgaaagtcgttgtcatccttctgttggccgccggggtggacgcgcgcacccatactgttgggggttctgccgcgcagaccaccgggcgcctcaccagcttatttgacatgggccccaggcagaaaatccagctcgttaacaccaatggcagctggcacatcaaccgcaccgccctgaactgcaatgactccttgcacaccggctttatcgcgtctctgttctacacccacagcttcaactcgtcaggatgtcccgaacgcatgtccgcctgccgcagtatcgaggccttccgggtgggatggggcgccttgcaatatgaggataatgtcaccaatccagaggatatgagaccctattgctggcactacccaccaaggcagtgtggcgtggtctccgcgaagactgtgtgtggcccagtgtactgtttcacccccagcccagtggtagtgggcacgaccgacaggcttggagcgcccacttacacgtggggggagaatgagacagatgtcttcctattgaacagcactcgaccaccgctggggtcatggttcggctgcacgtggatgaactcttctggctacaccaagacttgcggcgcaccaccctgccgtactagagctgacttcaacgccagcacggacctgttgtgccccacggactgttttaggaagcatcctgataccacttacctcaaatgcggctctgggccctggctcacgccaaggtgcctgatcgactacccctacaggctctggcattacccctgcacagttaactataccatcttcaaaataaggatgtatgtgggaggggttgagcacaggctcacggctgcatgcaatttcactcgtggggatcgttgcaacttggaggacagagacagaagtcaactgtctcctttgttgcactccaccacggaatgggccattttaccttgctcttactcggacctgcccgccttgtcgactggtcttctccacctccaccaaaacatcgtggacgtacaattcatgtatggcctatcacctgccctcacaaaatacatcgtccgatgggagtgggtaatactcttattcctgctcttagcggacgccagggtttgcgcctgcttatggatgctcatcttgttgggccaggccgaagcagcactagagaagctggtcatcttgcacgctgcgagcgcagctagctgcaatggcttcctatattttgtcatctttttcgtggctgcttggtacatcaagggtcgggtagtccccttagctacctattccctcactggcctgtggtcctttagcctactgctcctagcattgccccaacaggcttatgcttatgacgcatctgtgcatggccagataggagcggctctgctggtaatgatcaccctcttcacactcaccccggggtataagaccctcctcggccagtgtctgtggtggttgtgctatctcctgaccctgggggaagccatgattcaggagtgggtaccacccatgcaggtgcgcggcggccgcgatggcatcgcgtgggccgtcactatattctgcccgggtgtggtgtttgacattaccaaatggcttttggcgttgcttgggcctgcttacctcttaagggccgctttgacacatgtgccgtacttcgtcagagctcacgctctgataagggtatgcgctttggtgaagcagctcgcggggggtaggtatgttcaggtggcgctattggcccttggcaggtggactggcacctacatctatgaccacctcacacctatgtcggactgggccgctagcggcctgcgcgacttagcggtcgccgtggaacccatcatcttcagtccgatggagaagaaggtcatcgtctggggagcggagacggctgcatgtggggacattctacatggacttcccgtgtccgcccgactcggccaggagatcctcctcggcccagctgatggctacacctccaaggggtggaagctccttgcgcctatcactgcttatgcccagcagacacgaggcctattgggcgccatagtggtgagcatgacgggccgtgacaagacagaacaggccggggagatccaggtcctctccacagtcactcaaaccttcctcgggactaccatctcaggagtcttgtggaccgtctaccacggggctggcaacaagaccctagccggctcgcggggcccggtcacacagatgtactccagcgccgagggagacttggtagggtggcccagtcctcccgggactaaatccatggagccgtgcacgtgcggagcggtcgacctgtacctggtcacgcggaacgctgacgtcatcccggctcggagacgcggggacaagcggggagcgttgctctccccgagacctctctcaactctgaaggggtcttcggggggaccggtgctctgccccaggggccacgttgtcgggatcttccgggcagccatatgctcgcggggcgtggccaagtccatagatttcatccccgttgaggcaattgacatcgtcacgcgctcccccacctttactgacaacagcacgccaccggctgtgccccagacctatcaggttggatacttgcacgccccgactggcagcgggaagagcaccaaagtccctgtcgcatatgccgcccaggggtataaggtgctagtgctcaatccctcggtggccgccaccttggggtttggggcgtacttggccaaggcgcacggcatcaatcctaacattaggactggagtcaggactgtgacgaccggggaggctattacgtattccacgtatggcaagtttctcgctgatgggggctgcgcaggcggcgcctatgacatcatcatatgcgatgagtgccatgccacggatgctaccacccttctcggcatcggaacagttcttgaccaagcagagtcagctggggtcaggctaactgtgctggccacggctacgcctcccggatcaataacaacccctcaccccaacatagaggaggtagctctcggacaggagggtgagatccccttctatgggagagcgatccccctggcccacatcaagggagggaggcacctgatcttctgccactcgaagaaaaagtgtgacgagctcgcggcggccctccgggccatgggcttgaacgctgtggcatactacagagggttggacgtctccataataccagctcaaggagacgtggtggttgtcgccactgacgccctcatgacagggtacactggagactttgactccgtgattgactgcaacgtagcggttactcaagtcgtggacttcagcttggaccccaccttcaccatatccacacaaaccgtcccccaagacgccgtctcacgcagccagcgccgggggcgcacgggcagagggagactgggcatttacaggtacgtttccactggtgagcgagcttcgggaatgtttgacagcgtaacgctctgcgagtgctacgatgcaggggctgcatggtatgatctcacaccagcggaaaccaccgtcaggcttagggcgtatttcaacacgcccggcctgcccgtgtgccaagaccacctcgagttttgggaggcagttttcaccggcctcacacacatagatgcccactacctttcccaaacaaagcaagcgggggagaatttcgcatacctgacagcctatcaggccacagtgtgtgccagagccaaagcccctcccccgtcttgggacgtcatgtggaagtgcctgactcgactcaaacccacgctcgtgggccccacacctctcctgtaccgcctgggttcagttaccaacgatgtcaccttcacacaccctgtgacaaagtacatcgctacttgcatgcaagctgacctcgaggtcatgaccagcacgtgggtcctagccgggggagtcctggctgccatcgccgcgtactgcttggcgactgggtgtgtttccatcatcggccgtttgcacgtcaaccagcgaaccgtcgttgcacctgacaaggaggtcctctatgaggcttttgacgagatggaggagtgtgcttccagagcggccctcattgaggaggcgcaacggatagccgagatgctgaagtctaagatccaaggcttattgcagcaggcttccaagcaggcccaggacatacaaccaaccgtgcaggcttcatggcccaaggtggagcaattctgggccaaacacatgtggaacttcattagcggcatccaatatcttgcgggactgtcaacgctgccagggaaccccgctgtggcctctatgatggcattcagtgccgccatcaccagtccgctgtcgactagcaccaccatccttctcaacatcatgggaggctggctggcgtctcaaattgcgccacccgcaggggccacaggcttcgtggtcagtggcctggtgggggctgccataggcagcgtaggcttgggtaaggtgctggtggacatcttggcagggtacggtgcgggcatttcgggggctctcgtcgcattcaagatcatgtctggcgagaagccctccatggaggatgtcatcaacctgctgcccggaatcctgtccccgggcgccctggtggtgggggtcatttgcgcggccattctgcgccgtcatgtgggaccgggggaaggtgcggtccaatggatgaataggcttattgcctttgcttccagaggaaaccacgtcgcccccacccactatgtgacggagtcagatgcgtcgcagcgcgtgacccaactacttggctctctcaccataactagcctgcttagaaggctccacaattggattactgaggactgccccaccccatgcaatggctcatggctccgcgatgtgtgggactgggtgtgcaccatcctgactgactttaaaaactggctgacctccaagttgttcccaaagctgcccggcctccccttcatctcttgccaaaaggggtataggggcgactgggccggcacgggcatcatggtcacgcggtgcccttgtggcgccaacatttctggcaatgtccgcttcggctctatgagaatcacagggcctaagacctgcatgaacacctggcaggggactttccctatcaactgctacacggagggccaatgcatgccgagacctgcgccaaactttaagaccgccatctggagggtggcggcctcagagtacgcggaggtgacgcggcacgggtcgtactcttacataacagggctgaccgctgacaatctgaaggttccctgccaaataccatctccagagttcttttcctgggtagacggagtacagatccacaggtttgctcccactccaaagccgttctttcgggatgaggtctcgttcagcgtggggctcaactcatttgtagtcgggtctcagcttccctgcgaccctgaacccgacgcggacgtgttgatgtccatgctaacagatcctggccatatcacggcagaggctgcagcgcggcgcttagcgcgggggtcacccccatctgaggcaagctcctcagcaagccagctgtcggccccgtcgctgcgttccaccagtgccacccacggcacggcctatgatgtggccatggtggatgctaacctgttcatgaagggggaagtgattcggatagagtccgattccaaagtggtcgttctggactctctcgacccactggccgaagaggtgagcgacgtcgaaccctctataccatcagagtacttgatccccaagaaacaattcccaccagccttgccggcctgggcgcggcctgactacaacccaccgcttgtggaatcgtggaggaagcctgactaccaaccacccactgtcgcgggctgtgctctccccccccccaagaagaccccgacgccccccccaaggaagcgtcggacggtgagactcagtgagagcgccgtgggagacatcctccaacagctggctattaagacctttggccagccccctccaagcggaggcccagacccccccacgggggcgggcgccgccggctccggcggtcagacgccccctgatgagccggctccttcggagacggattctgtctcctccatgcccccccttgagggggagcccggagacccagacctggagcttggccaggtagagccccaaccccccccccaggggggggaggcggctcccgactcagactctgggtcgtggtctacctgctccgaggaggaggattccaccgtgtgctgctccatgtcatactcctggaccggggcccttataactccttgcagccccgaagaggagaagttgccaatcaatcccctgagcaactcattgttgcgctaccacaacaaggtgtactgcactacatcaagaagtgcgtcactgagggccaaaaaggtaacttttgacaggatgcaagtactcgatgcccactatgactcagtcttaaaggacattaagctagcggcctccaaggtcagcgcaaggtccctcagcttggaggaggcgtgcaagctgaccccgccccactctgcgaggtccaaatatggatttggggctaaggaggtccgcagcttgtccgggagggccgtcaaccacatcaagtccgtgtggaaggacctcttggaagactcacaaacaccaatacctacaaccatcatggccaagaatgaggtgttctgcgtgaaccctgctaaggggggcaagaaagcagctcgcctcatcgtttaccccgaccttggtgtcagggtctgcgaaaagatggccctctatgatgttgcacaaaagcttcctcaggcggtgatgggggcctcctatgggttccagtactctcccgcccagcgggtggagtttctcttgaaagcgtgggcggacaagaaagaccctatgggtttttcgtatgatacccgatgctttgactcaactgtcactgagagagacataagaactgaggaggacatatacctgtcctgctccctacccgaggaggcccgcactgccacacactcgctgactgagagactttacgtgggagggcccatgttcaacagcaagggccagacctgcgggtacaggcgttgccgcgctagcggggtgctcaccactagcatggggaataccatcacatgctatgtaaaagccctagcggcctgcaaggccgcagggatagttgcacccacgatgctggtatgcggcgatgacttggttgtcatctcagaaagccaggggactgaggaggacgagcggaacctgagagccttcacggaggctatgaccaggtattctgcccctcctggtgacccccccagaccggaatacgacttggagctgataacatcctgctcctcaaatgtgtctgtggcacttggcccccggggcaaccgcagatactatctgaccagagaccccaccactccaatcgcccgggctgcctgggaaacagtcagacactcccctgtcaattcatggctgggaaacatcatccagtacgctccaaccatatgggttcgtatggtcctgatgacacatttctactccattctcatggcccaagacactctggaccagaaccttaactttgaaatgtatggagctgtgtactctgtaagtcccttggacctcccagccataattgaaaagctccatgggcttgacgctttctctctgcacacatactctcccaacgaactgacgcgagtggcttcagccctcagaaaacttggggcgccacccctcagagcgtggaagagccgggcgcgtgcagtcagagcgtccctcatctcccgtggagggagagcggccgtctgcggtcgatatctcttcaactgggcggtgaagaccaagctcaaactcactccattgccggaggcgcgccatctggatttatccagttggttcaccgtcggcgccggcgggggcgacatttatcacagcgtgtcgcgtgcccgaccccgcttgttactccctagcctactcctactctttgtaggagtaggccttttcctactccccgctcggtagagcggcacacattagctacactccatagctaactgttccattttttttttttttttttttttttttttttttttttttttttttttttttttttttttttttcttttccttcctttctttttcactttacttcattctttcctggtggctccatcttagccctagtcacggctagctgtgaaaggtccgtgagccgcatgactgcagagagtgccgtaactggtctctctgcagatcatgt

SEQ ID NO: 82 - DNA, 9530 bp, Artificial Sequence
  synthetic DNA: J6/JFH-2.1 A2217S(CS/TI)
accggtgagtacaccggaattgccgggaagactgggtcctttcttggataaacccactctatgcccggccatttgggcgtgcccccgcaagactgctagccgagtagcgttgggttgcgaaaggccttgtggtactgcctgatagggtgcttgcgagtgccccgggaggtctcgtagaccgtgcaccatgagcacaaatcctaaacctcaaagaaaaaccaaaagaaacaccaaccgtcgcccacaagacgttaagtttccgggcggcggccagatcgttggcggagtatacttgttgccgcgcaggggccccaggttgggtgtgcgcgcgacaaggaagacttcggagcggtcccagccacgtggaaggcgccagcccatccctaaagatcggcgctccactggcaaatcctggggaaaaccaggatacccctggcccctatacgggaatgagggactcggctgggcaggatggctcctgtccccccgaggttcccgtccctcttggggccccaatgacccccggcataggtcgcgcaacgtgggtaaggtcatcgataccctaacgtgcggctttgccgacctcatggggtacatccctgtcgtgggcgccccgctcggcggcgtcgccagagctctcgcgcatggcgtgagagtcctggaggacggggttaattttgcaacagggaacttacccggttgctccttttctatcttcttgctggccctgctgtcctgcatcaccaccccggtctccgctgccgaagtgaagaacatcagtaccggctacatggtgactaacgactgcaccaatgacagcattacctggcagctccaggctgctgtcctccacgtccccgggtgcgtcccgtgcgagaaagtggggaatgcatctcagtgctggataccggtctcaccgaatgtggccgtgcagcggcccggcgccctcacgcagggcttgcggacgcacatcgacatggttgtgatgtccgccacgctctgctctgccctctacgtgggggacctctgcggtggggtgatgctcgcagcccaaatgttcattgtctcgccgcagcaccactggtttgtccaagactgcaattgctccatctaccctggtaccatcactggacaccgcatggcatgggacatgatgatgaactggtcgcccacggctaccatgatcttggcgtacgcgatgcgtgtccccgaggtcattatagacatcattagcggggctcattggggcgtcatgttcggcttggcctacttctctatgcagggagcgtgggcgaaagtcgttgtcatccttctgttggccgccggggtggacgcgcgcacccatactgttgggggttctgccgcgcagaccaccgggcgcctcaccagcttatttgacatgggccccaggcagaaaatccagctcgttaacaccaatggcagctggcacatcaaccgcaccgccctgaactgcaatgactccttgcacaccggctttatcgcgtctctgttctacacccacagcttcaactcgtcaggatgtcccgaacgcatgtccgcctgccgcagtatcgaggccttccgggtgggatggggcgccttgcaatatgaggataatgtcaccaatccagaggatatgagaccctattgctggcactacccaccaaggcagtgtggcgtggtctccgcgaagactgtgtgtggcccagtgtactgtttcacccccagcccagtggtagtgggcacgaccgacaggcttggagcgcccacttacacgtggggggagaatgagacagatgtcttcctattgaacagcactcgaccaccgctggggtcatggttcggctgcacgtggatgaactcttctggctacaccaagacttgcggcgcaccaccctgccgtactagagctgacttcaacgccagcacggacctgttgtgccccacggactgttttaggaagcatcctgataccacttacctcaaatgcggctctgggccctggctcacgccaaggtgcctgatcgactacccctacaggctctggcattacccctgcacagttaactataccatcttcaaaataaggatgtatgtgggaggggttgagcacaggctcacggctgcatgcaatttcactcgtggggatcgttgcaacttggaggacagagacagaagtcaactgtctcctttgttgcactccaccacggaatgggccattttaccttgctcttactcggacctgcccgccttgtcgactggtcttctccacctccaccaaaacatcgtggacgtacaattcatgtatggcctatcacctgccctcacaaaatacatcgtccgatgggagtgggtaatactcttattcctgctcttagcggacgccagggtttgcgcctgcttatggatgctcatcttgttgggccaggccgaagcagcactagagaagctggtcatcttgcacgctgcgagcgcagctagctgcaatggcttcctatattttgtcatctttttcgtggctgcttggtacatcaagggtcgggtagtccccttagctacctattccctcactggcctgtggtcctttagcctactgctcctagcattgccccaacaggcttatgcttatgacgcatctgtgcatggccagataggagcggctctgctggtaatgatcaccctcttcacactcaccccggggtataagaccctcctcggccagtgtctgtggtggttgtgctatctcctgaccctgggggaagccatgattcaggagtgggtaccacccatgcaggtgcgcggcggccgcgatggcatcgcgtgggccgtcactatattctgcccgggtgtggtgtttgacattaccaaatggcttttggcgttgcttgggcctgcttacctcttaagggccgctttgacacatgtgccgtacttcgtcagagctcacgctctgataagggtatgcgctttggtgaagcagctcgcggggggtaggtatgttcaggtggcgctattggcccttggcaggtggactggcacctacatctatgaccacctcacacctatgtcggactgggccgctagcggcctgcgcgacttagcggtcgccgtggaacccatcatcttcagtccgatggagaagaaggtcatcgtctggggagcggagacggctgcatgtggggacattctacatggacttcccgtgtccgcccgactcggccaggagatcctcctcggcccagctgatggctacacctccaaggggtggaagctccttgcgcctatcactgcttatgcccagcagacacgaggcctattgggcgccatagtggtgagcatgacgggccgtgacaagacagaacaggccggggagatccaggtcctctccacagtcactcaaaccttcctcgggactaccatctcaggagtcttgtggaccgtctaccacggggctggcaacaagaccctagccggctcgcggggcccggtcacacagatgtactccagcgccgagggagacttggtagggtggcccagtcctcccgggactaaatccatggagccgtgcacgtgcggagcggtcgacctgtacctggtcacgcggaacgctgacgtcatcccggctcggagacgcggggacaagcggggagcgttgctctccccgagacctctctcaactctgaaggggtcttcggggggaccggtgctctgccccaggggccacgttgtcgggatcttccgggcagccatatgctcgcggggcgtggccaagtccatagatttcatccccgttgaggcaattgacatcgtcacgcgctcccccacctttactgacaacagcacgccaccggctgtgccccagacctatcaggttggatacttgcacgccccgactggcagcgggaagagcaccaaagtccctgtcgcatatgccgcccaggggtataaggtgctagtgctcaatccctcggtggccgccaccttggggtttggggcgtacttggccaaggcgcacggcatcaatcctaacattaggactggagtcaggactgtgacgaccggggaggctattacgtattccacgtatggcaagtttctcgctgatgggggctgcgcaggcggcgcctatgacatcatcatatgcgatgagtgccatgccacggatgctaccacccttctcggcatcggaacagttcttgaccaagcagagtcagctggggtcaggctaactgtgctggccacggctacgcctcccggatcaataacaacccctcaccccaacatagaggaggtagctctcggacaggagggtgagatccccttctatgggagagcgatccccctggcccacatcaagggagggaggcacctgatcttctgccactcgaagaaaaagtgtgacgagctcgcggcggccctccgggccatgggcttgaacgctgtggcatactacagagggttggacgtctccataataccagctcaaggagacgtggtggttgtcgccactgacgccctcatgacagggtacactggagactttgactccgtgattgactgcaacgtagcggttactcaagtcgtggacttcagcttggaccccaccttcaccatatccacacaaaccgtcccccaagacgccgtctcacgcagccagcgccgggggcgcacgggcagagggagactgggcatttacaggtacgtttccactggtgagcgagcttcgggaatgtttgacagcgtaacgctctgcgagtgctacgatgcaggggctgcatggtatgatctcacaccagcggaaaccaccgtcaggcttagggcgtatttcaacacgcccggcctgcccgtgtgccaagaccacctcgagttttgggaggcagttttcaccggcctcacacacatagatgcccactacctttcccaaacaaagcaagcgggggagaatttcgcatacctgacagcctatcaggccacagtgtgtgccagagccaaagcccctcccccgtcttgggacgtcatgtggaagtgcctgactcgactcaaacccacgctcgtgggccccacacctctcctgtaccgcctgggttcagttaccaacgatgtcaccttcacacaccctgtgacaaagtacatcgctacttgcatgcaagctgacctcgaggtcatgaccagcacgtgggtcctagccgggggagtcctggctgccatcgccgcgtactgcttggcgactgggtgtgtttccatcatcggccgtttgcacgtcaaccagcgaaccgtcgttgcacctgacaaggaggtcctctatgaggcttttgacgagatggaggagtgtgcttccagagcggccctcattgaggaggcgcaacggatagccgagatgctgaagtctaagatccaaggcttattgcagcaggcttccaagcaggcccaggacatacaaccaaccgtgcaggcttcatggcccaaggtggagcaattctgggccaaacacatgtggaacttcattagcggcatccaatatcttgcgggactgtcaacgctgccagggaaccccgctgtggcctctatgatggcattcagtgccgccatcaccagtccgctgtcgactagcaccaccatccttctcaacatcatgggaggctggctggcgtctcaaattgcgccacccgcaggggccacaggcttcgtggtcagtggcctggtgggggctgccataggcagcgtaggcttgggtaaggtgctggtggacatcttggcagggtacggtgcgggcatttcgggggctctcgtcgcattcaagatcatgtctggcgagaagccctccatggaggatgtcatcaacctgctgcccggaatcctgtccccgggcgccctggtggtgggggtcatttgcgcggccattctgcgccgtcatgtgggaccgggggaaggtgcggtccaatggatgaataggcttattgcctttgcttccagaggaaaccacgtcgcccccacccactatgtgacggagtcagatgcgtcgcagcgcgtgacccaactacttggctctctcaccataactagcctgcttagaaggctccacaattggattactgaggactgccccaccccatgcaatggctcatggctccgcgatgtgtgggactgggtgtgcaccatcctgactgactttaaaaactggctgacctccaagttgttcccaaagctgcccggcctccccttcatctcttgccaaaaggggtataggggcgactgggccggcacgggcatcatggtcacgcggtgcccttgtggcgccaacatttctggcaatgtccgcttcggctctatgagaatcacagggcctaagacctgcatgaacacctggcaggggactttccctatcaactgctacacggagggccaatgcatgccgagacctgcgccaaactttaagaccgccatctggagggtggcggcctcagagtacgcggaggtgacgcggcacgggtcgtactcttacataacagggctgaccgctgacaatctgaaggttccctgccaaataccatctccagagttcttttcctgggtagacggagtacagatccacaggtttgctcccactccaaagccgttctttcgggatgaggtctcgttcagcgtggggctcaactcatttgtagtcgggtctcagcttccctgcgaccctgaacccgacgcggacgtgttgatgtccatgctaacagatcctggccatatcacggcagaggctgcagcgcggcgcttagcgcgggggtcacccccatctgaggcaagctcctcagcaagccagctgtcggccccgtcgctgcgttccaccagtgccacccacggcacggcctatgatgtggccatggtggatgctaacctgttcatgaagggggaagtgattcggatagagtccgattccaaagtggtcgttctggactctctcgacccactggccgaagaggtgagcgacgtcgaaccctctataccatcagagtacttgatccccaagaaacaattcccaccagccttgccggcctgggcgcggcctgactacaacccaccgcttgtggaatcgtggaggaagcctgactaccaaccacccactgtcgcgggctgtgctctccccccccccaagaagaccccgacgccccccccaaggaagcgtcggacggtgagactcagtgagagcgccgtgggagacatcctccaacagctggctattaagacctttggccagccccctccaagcggaggcccagacccccccacgggggcgggcgccgccggctccggcggtcagacgccccctgatgagccggctccttcggagacggattctgtctcctccatgcccccccttgagggggagcccggagacccagacctggagcttggccaggtagagccccaaccccccccccaggggggggaggcggctcccgactcagactctgggtcgtggtctacctgctccgaggaggaggattccaccgtgtgctgctccatgtcatactcctggaccggggcccttataactccttgcagccccgaagaggagaagttgccaatcaatcccctgagcaactcattgttgcgctaccacaacaaggtgtactgcactacatcaagaagtgcgtcactgagggccaaaaaggtaacttttgacaggatgcaagtactcgatgcccactatgactcagtcttaaaggacattaagctagcggcctccaaggtcagcgcaaggtccctcagcttggaggaggcgtgcaagctgaccccgccccactctgcgaggtccaaatatggatttggggctaaggaggtccgcagcttgtccgggagggccgtcaaccacatcaagtccgtgtggaaggacctcttggaagactcacaaacaccaatacctacaaccatcatggccaagaatgaggtgttctgcgtgaaccctgctaaggggggcaagaaagcagctcgcctcatcgtttaccccgaccttggtgtcagggtctgcgaaaagatggccctctatgatgttgcacaaaagcttcctcaggcggtgatgggggcctcctatgggttccagtactctcccgcccagcgggtggagtttctcttgaaagcgtgggcggacaagaaagaccctatgggtttttcgtatgatacccgatgctttgactcaactgtcactgagagagacataagaactgaggaggacatatacctgtcctgctccctacccgaggaggcccgcactgccatacactcgctgactgagagactttacgtgggagggcccatgttcaacagcaagggccagacctgcgggtacaggcgttgccgcgctagcggggtgctcaccactagcatggggaataccatcacatgctatgtaaaagccctagcggcctgcaaggccgcagggatagttgcacccacgatgctggtatgcggcgatgacttggttgtcatctcagaaagccaggggactgaggaggacgagcggaacctgagagccttcacggaggctatgaccaggtattctgcccctcctggtgacccccccagaccggaatacgacttggagctgataacatcctgctcctcaaatgtgtctgtggcacttggcccccggggcaaccgcagatactatctgaccagagaccccaccactccaatcgcccgggctgcctgggaaacagtcagacactcccctgtcaattcatggctgggaaacatcatccagtacgctccaaccatatgggttcgtatggtcctgatgacacatttctactccattctcatggcccaagacactctggaccagaaccttaactttgaaatgtatggagctgtgtactctgtaagtcccttggacctcccagccataattgaaaagctccatgggcttgacgctttctctctgcacacatactctcccaacgaactgacgcgagtggcttcagccctcagaaaacttggggcgccacccctcagagcgtggaagagccgggcgcgtgcagtcagagcgtccctcatctcccgtggagggagagcggccgtctgcggtcgatatctcttcaactgggcggtgaagaccaagctcaaactcactccattgccggaggcgcgccatctggatttatccagttggttcaccgtcggcgccggcgggggcgacatttatcacagcgtgtcgcgtgcccgaccccgcttgttactccttagcctactcctactctttgtaggagtaggccttttcctactccccgctcggtagagcggcacacattagctacactccatagctaactgttccattttttttttttttttttttttttttttttttttttttttttttttttttttttttttttttcttttccttcctttctttttcactttacttcattctttcctggtggctccatcttagccctagtcacggctagctgtgaaaggtccgtgagccgcatgactgcagagagtgccgtaactggtctctctgcagatcatgt

SEQ ID NO: 83 - DNA, 9530 bp, Artificial Sequence
  synthetic DNA: J6/JFH-2.1 A2217S(TI/LP)
accggtgagtacaccggaattgccgggaagactgggtcctttcttggataaacccactctatgcccggccatttgggcgtgcccccgcaagactgctagccgagtagcgttgggttgcgaaaggccttgtggtactgcctgatagggtgcttgcgagtgccccgggaggtctcgtagaccgtgcaccatgagcacaaatcctaaacctcaaagaaaaaccaaaagaaacaccaaccgtcgcccacaagacgttaagtttccgggcggcggccagatcgttggcggagtatacttgttgccgcgcaggggccccaggttgggtgtgcgcgcgacaaggaagacttcggagcggtcccagccacgtggaaggcgccagcccatccctaaagatcggcgctccactggcaaatcctggggaaaaccaggatacccctggcccctatacgggaatgagggactcggctgggcaggatggctcctgtccccccgaggttcccgtccctcttggggccccaatgacccccggcataggtcgcgcaacgtgggtaaggtcatcgataccctaacgtgcggctttgccgacctcatggggtacatccctgtcgtgggcgccccgctcggcggcgtcgccagagctctcgcgcatggcgtgagagtcctggaggacggggttaattttgcaacagggaacttacccggttgctccttttctatcttcttgctggccctgctgtcctgcatcaccaccccggtctccgctgccgaagtgaagaacatcagtaccggctacatggtgactaacgactgcaccaatgacagcattacctggcagctccaggctgctgtcctccacgtccccgggtgcgtcccgtgcgagaaagtggggaatgcatctcagtgctggataccggtctcaccgaatgtggccgtgcagcggcccggcgccctcacgcagggcttgcggacgcacatcgacatggttgtgatgtccgccacgctctgctctgccctctacgtgggggacctctgcggtggggtgatgctcgcagcccaaatgttcattgtctcgccgcagcaccactggtttgtccaagactgcaattgctccatctaccctggtaccatcactggacaccgcatggcatgggacatgatgatgaactggtcgcccacggctaccatgatcttggcgtacgcgatgcgtgtccccgaggtcattatagacatcattagcggggctcattggggcgtcatgttcggcttggcctacttctctatgcagggagcgtgggcgaaagtcgttgtcatccttctgttggccgccggggtggacgcgcgcacccatactgttgggggttctgccgcgcagaccaccgggcgcctcaccagcttatttgacatgggccccaggcagaaaatccagctcgttaacaccaatggcagctggcacatcaaccgcaccgccctgaactgcaatgactccttgcacaccggctttatcgcgtctctgttctacacccacagcttcaactcgtcaggatgtcccgaacgcatgtccgcctgccgcagtatcgaggccttccgggtgggatggggcgccttgcaatatgaggataatgtcaccaatccagaggatatgagaccctattgctggcactacccaccaaggcagtgtggcgtggtctccgcgaagactgtgtgtggcccagtgtactgtttcacccccagcccagtggtagtgggcacgaccgacaggcttggagcgcccacttacacgtggggggagaatgagacagatgtcttcctattgaacagcactcgaccaccgctggggtcatggttcggctgcacgtggatgaactcttctggctacaccaagacttgcggcgcaccaccctgccgtactagagctgacttcaacgccagcacggacctgttgtgccccacggactgttttaggaagcatcctgataccacttacctcaaatgcggctctgggccctggctcacgccaaggtgcctgatcgactacccctacaggctctggcattacccctgcacagttaactataccatcttcaaaataaggatgtatgtgggaggggttgagcacaggctcacggctgcatgcaatttcactcgtggggatcgttgcaacttggaggacagagacagaagtcaactgtctcctttgttgcactccaccacggaatgggccattttaccttgctcttactcggacctgcccgccttgtcgactggtcttctccacctccaccaaaacatcgtggacgtacaattcatgtatggcctatcacctgccctcacaaaatacatcgtccgatgggagtgggtaatactcttattcctgctcttagcggacgccagggtttgcgcctgcttatggatgctcatcttgttgggccaggccgaagcagcactagagaagctggtcatcttgcacgctgcgagcgcagctagctgcaatggcttcctatattttgtcatctttttcgtggctgcttggtacatcaagggtcgggtagtccccttagctacctattccctcactggcctgtggtcctttagcctactgctcctagcattgccccaacaggcttatgcttatgacgcatctgtgcatggccagataggagcggctctgctggtaatgatcaccctcttcacactcaccccggggtataagaccctcctcggccagtgtctgtggtggttgtgctatctcctgaccctgggggaagccatgattcaggagtgggtaccacccatgcaggtgcgcggcggccgcgatggcatcgcgtgggccgtcactatattctgcccgggtgtggtgtttgacattaccaaatggcttttggcgttgcttgggcctgcttacctcttaagggccgctttgacacatgtgccgtacttcgtcagagctcacgctctgataagggtatgcgctttggtgaagcagctcgcggggggtaggtatgttcaggtggcgctattggcccttggcaggtggactggcacctacatctatgaccacctcacacctatgtcggactgggccgctagcggcctgcgcgacttagcggtcgccgtggaacccatcatcttcagtccgatggagaagaaggtcatcgtctggggagcggagacggctgcatgtggggacattctacatggacttcccgtgtccgcccgactcggccaggagatcctcctcggcccagctgatggctacacctccaaggggtggaagctccttgcgcctatcactgcttatgcccagcagacacgaggcctattgggcgccatagtggtgagcatgacgggccgtgacaagacagaacaggccggggagatccaggtcctctccacagtcactcaaaccttcctcgggactaccatctcaggagtcttgtggaccgtctaccacggggctggcaacaagaccctagccggctcgcggggcccggtcacacagatgtactccagcgccgagggagacttggtagggtggcccagtcctcccgggactaaatccatggagccgtgcacgtgcggagcggtcgacctgtacctggtcacgcggaacgctgacgtcatcccggctcggagacgcggggacaagcggggagcgttgctctccccgagacctctctcaactctgaaggggtcttcggggggaccggtgctctgccccaggggccacgttgtcgggatcttccgggcagccatatgctcgcggggcgtggccaagtccatagatttcatccccgttgaggcaattgacatcgtcacgcgctcccccacctttactgacaacagcacgccaccggctgtgccccagacctatcaggttggatacttgcacgccccgactggcagcgggaagagcaccaaagtccctgtcgcatatgccgcccaggggtataaggtgctagtgctcaatccctcggtggccgccaccttggggtttggggcgtacttggccaaggcgcacggcatcaatcctaacattaggactggagtcaggactgtgacgaccggggaggctattacgtattccacgtatggcaagtttctcgctgatgggggctgcgcaggcggcgcctatgacatcatcatatgcgatgagtgccatgccacggatgctaccacccttctcggcatcggaacagttcttgaccaagcagagtcagctggggtcaggctaactgtgctggccacggctacgcctcccggatcaataacaacccctcaccccaacatagaggaggtagctctcggacaggagggtgagatccccttctatgggagagcgatccccctggcccacatcaagggagggaggcacctgatcttctgccactcgaagaaaaagtgtgacgagctcgcggcggccctccgggccatgggcttgaacgctgtggcatactacagagggttggacgtctccataataccagctcaaggagacgtggtggttgtcgccactgacgccctcatgacagggtacactggagactttgactccgtgattgactgcaacgtagcggttactcaagtcgtggacttcagcttggaccccaccttcaccatatccacacaaaccgtcccccaagacgccgtctcacgcagccagcgccgggggcgcacgggcagagggagactgggcatttacaggtacgtttccactggtgagcgagcttcgggaatgtttgacagcgtaacgctctgcgagtgctacgatgcaggggctgcatggtatgatctcacaccagcggaaaccaccgtcaggcttagggcgtatttcaacacgcccggcctgcccgtgtgccaagaccacctcgagttttgggaggcagttttcaccggcctcacacacatagatgcccactacctttcccaaacaaagcaagcgggggagaatttcgcatacctgacagcctatcaggccacagtgtgtgccagagccaaagcccctcccccgtcttgggacgtcatgtggaagtgcctgactcgactcaaacccacgctcgtgggccccacacctctcctgtaccgcctgggttcagttaccaacgatgtcaccttcacacaccctgtgacaaagtacatcgctacttgcatgcaagctgacctcgaggtcatgaccagcacgtgggtcctagccgggggagtcctggctgccatcgccgcgtactgcttggcgactgggtgtgtttccatcatcggccgtttgcacgtcaaccagcgaaccgtcgttgcacctgacaaggaggtcctctatgaggcttttgacgagatggaggagtgtgcttccagagcggccctcattgaggaggcgcaacggatagccgagatgctgaagtctaagatccaaggcttattgcagcaggcttccaagcaggcccaggacatacaaccaaccgtgcaggcttcatggcccaaggtggagcaattctgggccaaacacatgtggaacttcattagcggcatccaatatcttgcgggactgtcaacgctgccagggaaccccgctgtggcctctatgatggcattcagtgccgccatcaccagtccgctgtcgactagcaccaccatccttctcaacatcatgggaggctggctggcgtctcaaattgcgccacccgcaggggccacaggcttcgtggtcagtggcctggtgggggctgccataggcagcgtaggcttgggtaaggtgctggtggacatcttggcagggtacggtgcgggcatttcgggggctctcgtcgcattcaagatcatgtctggcgagaagccctccatggaggatgtcatcaacctgctgcccggaatcctgtccccgggcgccctggtggtgggggtcatttgcgcggccattctgcgccgtcatgtgggaccgggggaaggtgcggtccaatggatgaataggcttattgcctttgcttccagaggaaaccacgtcgcccccacccactatgtgacggagtcagatgcgtcgcagcgcgtgacccaactacttggctctctcaccataactagcctgcttagaaggctccacaattggattactgaggactgccccaccccatgcaatggctcatggctccgcgatgtgtgggactgggtgtgcaccatcctgactgactttaaaaactggctgacctccaagttgttcccaaagctgcccggcctccccttcatctcttgccaaaaggggtataggggcgactgggccggcacgggcatcatggtcacgcggtgcccttgtggcgccaacatttctggcaatgtccgcttcggctctatgagaatcacagggcctaagacctgcatgaacacctggcaggggactttccctatcaactgctacacggagggccaatgcatgccgagacctgcgccaaactttaagaccgccatctggagggtggcggcctcagagtacgcggaggtgacgcggcacgggtcgtactcttacataacagggctgaccgctgacaatctgaaggttccctgccaaataccatctccagagttcttttcctgggtagacggagtacagatccacaggtttgctcccactccaaagccgttctttcgggatgaggtctcgttcagcgtggggctcaactcatttgtagtcgggtctcagcttccctgcgaccctgaacccgacgcggacgtgttgatgtccatgctaacagatcctggccatatcacggcagaggctgcagcgcggcgcttagcgcgggggtcacccccatctgaggcaagctcctcagcaagccagctgtcggccccgtcgctgcgttccacctgtgccacccacggcacggcctatgatgtggccatggtggatgctaacctgttcatgaagggggaagtgattcggatagagtccgattccaaagtggtcgttctggactctctcgacccactggccgaagaggtgagcgacgtcgaaccctctataccatcagagtacttgatccccaagaaacaattcccaccagccttgccggcctgggcgcggcctgactacaacccaccgcttgtggaatcgtggaggaagcctgactaccaaccacccactgtcgcgggctgtgctctccccccccccaagaagaccccgacgccccccccaaggaagcgtcggacggtgagactcagtgagagcgccgtgggagacatcctccaacagctggctattaagacctttggccagccccctccaagcggaggcccagacccccccacgggggcgggcgccgccggctccggcggtcagacgccccctgatgagccggctccttcggagacggattctgtctcctccatgcccccccttgagggggagcccggagacccagacctggagcttggccaggtagagccccaaccccccccccaggggggggaggcggctcccgactcagactctgggtcgtggtctacctgctccgaggaggaggattccaccgtgtgctgctccatgtcatactcctggaccggggcccttataactccttgcagccccgaagaggagaagttgccaatcaatcccctgagcaactcattgttgcgctaccacaacaaggtgtactgcactacatcaagaagtgcgtcactgagggccaaaaaggtaacttttgacaggatgcaagtactcgatgcccactatgactcagtcttaaaggacattaagctagcggcctccaaggtcagcgcaaggtccctcagcttggaggaggcgtgcaagctgaccccgccccactctgcgaggtccaaatatggatttggggctaaggaggtccgcagcttgtccgggagggccgtcaaccacatcaagtccgtgtggaaggacctcttggaagactcacaaacaccaatacctacaaccatcatggccaagaatgaggtgttctgcgtgaaccctgctaaggggggcaagaaagcagctcgcctcatcgtttaccccgaccttggtgtcagggtctgcgaaaagatggccctctatgatgttgcacaaaagcttcctcaggcggtgatgggggcctcctatgggttccagtactctcccgcccagcgggtggagtttctcttgaaagcgtgggcggacaagaaagaccctatgggtttttcgtatgatacccgatgctttgactcaactgtcactgagagagacataagaactgaggaggacatatacctgtcctgctccctacccgaggaggcccgcactgccatacactcgctgactgagagactttacgtgggagggcccatgttcaacagcaagggccagacctgcgggtacaggcgttgccgcgctagcggggtgctcaccactagcatggggaataccatcacatgctatgtaaaagccctagcggcctgcaaggccgcagggatagttgcacccacgatgctggtatgcggcgatgacttggttgtcatctcagaaagccaggggactgaggaggacgagcggaacctgagagccttcacggaggctatgaccaggtattctgcccctcctggtgacccccccagaccggaatacgacttggagctgataacatcctgctcctcaaatgtgtctgtggcacttggcccccggggcaaccgcagatactatctgaccagagaccccaccactccaatcgcccgggctgcctgggaaacagtcagacactcccctgtcaattcatggctgggaaacatcatccagtacgctccaaccatatgggttcgtatggtcctgatgacacatttctactccattctcatggcccaagacactctggaccagaaccttaactttgaaatgtatggagctgtgtactctgtaagtcccttggacctcccagccataattgaaaagctccatgggcttgacgctttctctctgcacacatactctcccaacgaactgacgcgagtggcttcagccctcagaaaacttggggcgccacccctcagagcgtggaagagccgggcgcgtgcagtcagagcgtccctcatctcccgtggagggagagcggccgtctgcggtcgatatctcttcaactgggcggtgaagaccaagctcaaactcactccattgccggaggcgcgccatctggatttatccagttggttcaccgtcggcgccggcgggggcgacatttatcacagcgtgtcgcgtgcccgaccccgcttgttactccctagcctactcctactctttgtaggagtaggccttttcctactccccgctcggtagagcggcacacattagctacactccatagctaactgttccattttttttttttttttttttttttttttttttttttttttttttttttttttttttttttttcttttccttcctttctttttcactttacttcattctttcctggtggctccatcttagccctagtcacggctagctgtgaaaggtccgtgagccgcatgactgcagagagtgccgtaactggtctctctgcagatcatgt

SEQ ID NO: 84 - DNA, 9530 bp, Artificial Sequence
  synthetic DNA: J6/JFH-2.1 A2217S(CS/TI/LP)
accggtgagtacaccggaattgccgggaagactgggtcctttcttggataaacccactctatgcccggccatttgggcgtgcccccgcaagactgctagccgagtagcgttgggttgcgaaaggccttgtggtactgcctgatagggtgcttgcgagtgccccgggaggtctcgtagaccgtgcaccatgagcacaaatcctaaacctcaaagaaaaaccaaaagaaacaccaaccgtcgcccacaagacgttaagtttccgggcggcggccagatcgttggcggagtatacttgttgccgcgcaggggccccaggttgggtgtgcgcgcgacaaggaagacttcggagcggtcccagccacgtggaaggcgccagcccatccctaaagatcggcgctccactggcaaatcctggggaaaaccaggatacccctggcccctatacgggaatgagggactcggctgggcaggatggctcctgtccccccgaggttcccgtccctcttggggccccaatgacccccggcataggtcgcgcaacgtgggtaaggtcatcgataccctaacgtgcggctttgccgacctcatggggtacatccctgtcgtgggcgccccgctcggcggcgtcgccagagctctcgcgcatggcgtgagagtcctggaggacggggttaattttgcaacagggaacttacccggttgctccttttctatcttcttgctggccctgctgtcctgcatcaccaccccggtctccgctgccgaagtgaagaacatcagtaccggctacatggtgactaacgactgcaccaatgacagcattacctggcagctccaggctgctgtcctccacgtccccgggtgcgtcccgtgcgagaaagtggggaatgcatctcagtgctggataccggtctcaccgaatgtggccgtgcagcggcccggcgccctcacgcagggcttgcggacgcacatcgacatggttgtgatgtccgccacgctctgctctgccctctacgtgggggacctctgcggtggggtgatgctcgcagcccaaatgttcattgtctcgccgcagcaccactggtttgtccaagactgcaattgctccatctaccctggtaccatcactggacaccgcatggcatgggacatgatgatgaactggtcgcccacggctaccatgatcttggcgtacgcgatgcgtgtccccgaggtcattatagacatcattagcggggctcattggggcgtcatgttcggcttggcctacttctctatgcagggagcgtgggcgaaagtcgttgtcatccttctgttggccgccggggtggacgcgcgcacccatactgttgggggttctgccgcgcagaccaccgggcgcctcaccagcttatttgacatgggccccaggcagaaaatccagctcgttaacaccaatggcagctggcacatcaaccgcaccgccctgaactgcaatgactccttgcacaccggctttatcgcgtctctgttctacacccacagcttcaactcgtcaggatgtcccgaacgcatgtccgcctgccgcagtatcgaggccttccgggtgggatggggcgccttgcaatatgaggataatgtcaccaatccagaggatatgagaccctattgctggcactacccaccaaggcagtgtggcgtggtctccgcgaagactgtgtgtggcccagtgtactgtttcacccccagcccagtggtagtgggcacgaccgacaggcttggagcgcccacttacacgtggggggagaatgagacagatgtcttcctattgaacagcactcgaccaccgctggggtcatggttcggctgcacgtggatgaactcttctggctacaccaagacttgcggcgcaccaccctgccgtactagagctgacttcaacgccagcacggacctgttgtgccccacggactgttttaggaagcatcctgataccacttacctcaaatgcggctctgggccctggctcacgccaaggtgcctgatcgactacccctacaggctctggcattacccctgcacagttaactataccatcttcaaaataaggatgtatgtgggaggggttgagcacaggctcacggctgcatgcaatttcactcgtggggatcgttgcaacttggaggacagagacagaagtcaactgtctcctttgttgcactccaccacggaatgggccattttaccttgctcttactcggacctgcccgccttgtcgactggtcttctccacctccaccaaaacatcgtggacgtacaattcatgtatggcctatcacctgccctcacaaaatacatcgtccgatgggagtgggtaatactcttattcctgctcttagcggacgccagggtttgcgcctgcttatggatgctcatcttgttgggccaggccgaagcagcactagagaagctggtcatcttgcacgctgcgagcgcagctagctgcaatggcttcctatattttgtcatctttttcgtggctgcttggtacatcaagggtcgggtagtccccttagctacctattccctcactggcctgtggtcctttagcctactgctcctagcattgccccaacaggcttatgcttatgacgcatctgtgcatggccagataggagcggctctgctggtaatgatcaccctcttcacactcaccccggggtataagaccctcctcggccagtgtctgtggtggttgtgctatctcctgaccctgggggaagccatgattcaggagtgggtaccacccatgcaggtgcgcggcggccgcgatggcatcgcgtgggccgtcactatattctgcccgggtgtggtgtttgacattaccaaatggcttttggcgttgcttgggcctgcttacctcttaagggccgctttgacacatgtgccgtacttcgtcagagctcacgctctgataagggtatgcgctttggtgaagcagctcgcggggggtaggtatgttcaggtggcgctattggcccttggcaggtggactggcacctacatctatgaccacctcacacctatgtcggactgggccgctagcggcctgcgcgacttagcggtcgccgtggaacccatcatcttcagtccgatggagaagaaggtcatcgtctggggagcggagacggctgcatgtggggacattctacatggacttcccgtgtccgcccgactcggccaggagatcctcctcggcccagctgatggctacacctccaaggggtggaagctccttgcgcctatcactgcttatgcccagcagacacgaggcctattgggcgccatagtggtgagcatgacgggccgtgacaagacagaacaggccggggagatccaggtcctctccacagtcactcaaaccttcctcgggactaccatctcaggagtcttgtggaccgtctaccacggggctggcaacaagaccctagccggctcgcggggcccggtcacacagatgtactccagcgccgagggagacttggtagggtggcccagtcctcccgggactaaatccatggagccgtgcacgtgcggagcggtcgacctgtacctggtcacgcggaacgctgacgtcatcccggctcggagacgcggggacaagcggggagcgttgctctccccgagacctctctcaactctgaaggggtcttcggggggaccggtgctctgccccaggggccacgttgtcgggatcttccgggcagccatatgctcgcggggcgtggccaagtccatagatttcatccccgttgaggcaattgacatcgtcacgcgctcccccacctttactgacaacagcacgccaccggctgtgccccagacctatcaggttggatacttgcacgccccgactggcagcgggaagagcaccaaagtccctgtcgcatatgccgcccaggggtataaggtgctagtgctcaatccctcggtggccgccaccttggggtttggggcgtacttggccaaggcgcacggcatcaatcctaacattaggactggagtcaggactgtgacgaccggggaggctattacgtattccacgtatggcaagtttctcgctgatgggggctgcgcaggcggcgcctatgacatcatcatatgcgatgagtgccatgccacggatgctaccacccttctcggcatcggaacagttcttgaccaagcagagtcagctggggtcaggctaactgtgctggccacggctacgcctcccggatcaataacaacccctcaccccaacatagaggaggtagctctcggacaggagggtgagatccccttctatgggagagcgatccccctggcccacatcaagggagggaggcacctgatcttctgccactcgaagaaaaagtgtgacgagctcgcggcggccctccgggccatgggcttgaacgctgtggcatactacagagggttggacgtctccataataccagctcaaggagacgtggtggttgtcgccactgacgccctcatgacagggtacactggagactttgactccgtgattgactgcaacgtagcggttactcaagtcgtggacttcagcttggaccccaccttcaccatatccacacaaaccgtcccccaagacgccgtctcacgcagccagcgccgggggcgcacgggcagagggagactgggcatttacaggtacgtttccactggtgagcgagcttcgggaatgtttgacagcgtaacgctctgcgagtgctacgatgcaggggctgcatggtatgatctcacaccagcggaaaccaccgtcaggcttagggcgtatttcaacacgcccggcctgcccgtgtgccaagaccacctcgagttttgggaggcagttttcaccggcctcacacacatagatgcccactacctttcccaaacaaagcaagcgggggagaatttcgcatacctgacagcctatcaggccacagtgtgtgccagagccaaagcccctcccccgtcttgggacgtcatgtggaagtgcctgactcgactcaaacccacgctcgtgggccccacacctctcctgtaccgcctgggttcagttaccaacgatgtcaccttcacacaccctgtgacaaagtacatcgctacttgcatgcaagctgacctcgaggtcatgaccagcacgtgggtcctagccgggggagtcctggctgccatcgccgcgtactgcttggcgactgggtgtgtttccatcatcggccgtttgcacgtcaaccagcgaaccgtcgttgcacctgacaaggaggtcctctatgaggcttttgacgagatggaggagtgtgcttccagagcggccctcattgaggaggcgcaacggatagccgagatgctgaagtctaagatccaaggcttattgcagcaggcttccaagcaggcccaggacatacaaccaaccgtgcaggcttcatggcccaaggtggagcaattctgggccaaacacatgtggaacttcattagcggcatccaatatcttgcgggactgtcaacgctgccagggaaccccgctgtggcctctatgatggcattcagtgccgccatcaccagtccgctgtcgactagcaccaccatccttctcaacatcatgggaggctggctggcgtctcaaattgcgccacccgcaggggccacaggcttcgtggtcagtggcctggtgggggctgccataggcagcgtaggcttgggtaaggtgctggtggacatcttggcagggtacggtgcgggcatttcgggggctctcgtcgcattcaagatcatgtctggcgagaagccctccatggaggatgtcatcaacctgctgcccggaatcctgtccccgggcgccctggtggtgggggtcatttgcgcggccattctgcgccgtcatgtgggaccgggggaaggtgcggtccaatggatgaataggcttattgcctttgcttccagaggaaaccacgtcgcccccacccactatgtgacggagtcagatgcgtcgcagcgcgtgacccaactacttggctctctcaccataactagcctgcttagaaggctccacaattggattactgaggactgccccaccccatgcaatggctcatggctccgcgatgtgtgggactgggtgtgcaccatcctgactgactttaaaaactggctgacctccaagttgttcccaaagctgcccggcctccccttcatctcttgccaaaaggggtataggggcgactgggccggcacgggcatcatggtcacgcggtgcccttgtggcgccaacatttctggcaatgtccgcttcggctctatgagaatcacagggcctaagacctgcatgaacacctggcaggggactttccctatcaactgctacacggagggccaatgcatgccgagacctgcgccaaactttaagaccgccatctggagggtggcggcctcagagtacgcggaggtgacgcggcacgggtcgtactcttacataacagggctgaccgctgacaatctgaaggttccctgccaaataccatctccagagttcttttcctgggtagacggagtacagatccacaggtttgctcccactccaaagccgttctttcgggatgaggtctcgttcagcgtggggctcaactcatttgtagtcgggtctcagcttccctgcgaccctgaacccgacgcggacgtgttgatgtccatgctaacagatcctggccatatcacggcagaggctgcagcgcggcgcttagcgcgggggtcacccccatctgaggcaagctcctcagcaagccagctgtcggccccgtcgctgcgttccaccagtgccacccacggcacggcctatgatgtggccatggtggatgctaacctgttcatgaagggggaagtgattcggatagagtccgattccaaagtggtcgttctggactctctcgacccactggccgaagaggtgagcgacgtcgaaccctctataccatcagagtacttgatccccaagaaacaattcccaccagccttgccggcctgggcgcggcctgactacaacccaccgcttgtggaatcgtggaggaagcctgactaccaaccacccactgtcgcgggctgtgctctccccccccccaagaagaccccgacgccccccccaaggaagcgtcggacggtgagactcagtgagagcgccgtgggagacatcctccaacagctggctattaagacctttggccagccccctccaagcggaggcccagacccccccacgggggcgggcgccgccggctccggcggtcagacgccccctgatgagccggctccttcggagacggattctgtctcctccatgcccccccttgagggggagcccggagacccagacctggagcttggccaggtagagccccaaccccccccccaggggggggaggcggctcccgactcagactctgggtcgtggtctacctgctccgaggaggaggattccaccgtgtgctgctccatgtcatactcctggaccggggcccttataactccttgcagccccgaagaggagaagttgccaatcaatcccctgagcaactcattgttgcgctaccacaacaaggtgtactgcactacatcaagaagtgcgtcactgagggccaaaaaggtaacttttgacaggatgcaagtactcgatgcccactatgactcagtcttaaaggacattaagctagcggcctccaaggtcagcgcaaggtccctcagcttggaggaggcgtgcaagctgaccccgccccactctgcgaggtccaaatatggatttggggctaaggaggtccgcagcttgtccgggagggccgtcaaccacatcaagtccgtgtggaaggacctcttggaagactcacaaacaccaatacctacaaccatcatggccaagaatgaggtgttctgcgtgaaccctgctaaggggggcaagaaagcagctcgcctcatcgtttaccccgaccttggtgtcagggtctgcgaaaagatggccctctatgatgttgcacaaaagcttcctcaggcggtgatgggggcctcctatgggttccagtactctcccgcccagcgggtggagtttctcttgaaagcgtgggcggacaagaaagaccctatgggtttttcgtatgatacccgatgctttgactcaactgtcactgagagagacataagaactgaggaggacatatacctgtcctgctccctacccgaggaggcccgcactgccatacactcgctgactgagagactttacgtgggagggcccatgttcaacagcaagggccagacctgcgggtacaggcgttgccgcgctagcggggtgctcaccactagcatggggaataccatcacatgctatgtaaaagccctagcggcctgcaaggccgcagggatagttgcacccacgatgctggtatgcggcgatgacttggttgtcatctcagaaagccaggggactgaggaggacgagcggaacctgagagccttcacggaggctatgaccaggtattctgcccctcctggtgacccccccagaccggaatacgacttggagctgataacatcctgctcctcaaatgtgtctgtggcacttggcccccggggcaaccgcagatactatctgaccagagaccccaccactccaatcgcccgggctgcctgggaaacagtcagacactcccctgtcaattcatggctgggaaacatcatccagtacgctccaaccatatgggttcgtatggtcctgatgacacatttctactccattctcatggcccaagacactctggaccagaaccttaactttgaaatgtatggagctgtgtactctgtaagtcccttggacctcccagccataattgaaaagctccatgggcttgacgctttctctctgcacacatactctcccaacgaactgacgcgagtggcttcagccctcagaaaacttggggcgccacccctcagagcgtggaagagccgggcgcgtgcagtcagagcgtccctcatctcccgtggagggagagcggccgtctgcggtcgatatctcttcaactgggcggtgaagaccaagctcaaactcactccattgccggaggcgcgccatctggatttatccagttggttcaccgtcggcgccggcgggggcgacatttatcacagcgtgtcgcgtgcccgaccccgcttgttactccctagcctactcctactctttgtaggagtaggccttttcctactccccgctcggtagagcggcacacattagctacactccatagctaactgttccattttttttttttttttttttttttttttttttttttttttttttttttttttttttttttttcttttccttcctttctttttcactttacttcattctttcctggtggctccatcttagccctagtcacggctagctgtgaaaggtccgtgagccgcatgactgcagagagtgccgtaactggtctctctgcagatcatgt

SEQ ID NO: 85 - DNA, 9530 bp, Artificial Sequence
  synthetic DNA: J6/JFH-2.1 A2217S(AT/CS/TI/LP)
accggtgagtacaccggaattgccgggaagactgggtcctttcttggataaacccactctatgcccggccatttgggcgtgcccccgcaagactgctagccgagtagcgttgggttgcgaaaggccttgtggtactgcctgatagggtgcttgcgagtgccccgggaggtctcgtagaccgtgcaccatgagcacaaatcctaaacctcaaagaaaaaccaaaagaaacaccaaccgtcgcccacaagacgttaagtttccgggcggcggccagatcgttggcggagtatacttgttgccgcgcaggggccccaggttgggtgtgcgcgcgacaaggaagacttcggagcggtcccagccacgtggaaggcgccagcccatccctaaagatcggcgctccactggcaaatcctggggaaaaccaggatacccctggcccctatacgggaatgagggactcggctgggcaggatggctcctgtccccccgaggttcccgtccctcttggggccccaatgacccccggcataggtcgcgcaacgtgggtaaggtcatcgataccctaacgtgcggctttgccgacctcatggggtacatccctgtcgtgggcgccccgctcggcggcgtcaccagagctctcgcgcatggcgtgagagtcctggaggacggggttaattttgcaacagggaacttacccggttgctccttttctatcttcttgctggccctgctgtcctgcatcaccaccccggtctccgctgccgaagtgaagaacatcagtaccggctacatggtgactaacgactgcaccaatgacagcattacctggcagctccaggctgctgtcctccacgtccccgggtgcgtcccgtgcgagaaagtggggaatgcatctcagtgctggataccggtctcaccgaatgtggccgtgcagcggcccggcgccctcacgcagggcttgcggacgcacatcgacatggttgtgatgtccgccacgctctgctctgccctctacgtgggggacctctgcggtggggtgatgctcgcagcccaaatgttcattgtctcgccgcagcaccactggtttgtccaagactgcaattgctccatctaccctggtaccatcactggacaccgcatggcatgggacatgatgatgaactggtcgcccacggctaccatgatcttggcgtacgcgatgcgtgtccccgaggtcattatagacatcattagcggggctcattggggcgtcatgttcggcttggcctacttctctatgcagggagcgtgggcgaaagtcgttgtcatccttctgttggccgccggggtggacgcgcgcacccatactgttgggggttctgccgcgcagaccaccgggcgcctcaccagcttatttgacatgggccccaggcagaaaatccagctcgttaacaccaatggcagctggcacatcaaccgcaccgccctgaactgcaatgactccttgcacaccggctttatcgcgtctctgttctacacccacagcttcaactcgtcaggatgtcccgaacgcatgtccgcctgccgcagtatcgaggccttccgggtgggatggggcgccttgcaatatgaggataatgtcaccaatccagaggatatgagaccctattgctggcactacccaccaaggcagtgtggcgtggtctccgcgaagactgtgtgtggcccagtgtactgtttcacccccagcccagtggtagtgggcacgaccgacaggcttggagcgcccacttacacgtggggggagaatgagacagatgtcttcctattgaacagcactcgaccaccgctggggtcatggttcggctgcacgtggatgaactcttctggctacaccaagacttgcggcgcaccaccctgccgtactagagctgacttcaacgccagcacggacctgttgtgccccacggactgttttaggaagcatcctgataccacttacctcaaatgcggctctgggccctggctcacgccaaggtgcctgatcgactacccctacaggctctggcattacccctgcacagttaactataccatcttcaaaataaggatgtatgtgggaggggttgagcacaggctcacggctgcatgcaatttcactcgtggggatcgttgcaacttggaggacagagacagaagtcaactgtctcctttgttgcactccaccacggaatgggccattttaccttgctcttactcggacctgcccgccttgtcgactggtcttctccacctccaccaaaacatcgtggacgtacaattcatgtatggcctatcacctgccctcacaaaatacatcgtccgatgggagtgggtaatactcttattcctgctcttagcggacgccagggtttgcgcctgcttatggatgctcatcttgttgggccaggccgaagcagcactagagaagctggtcatcttgcacgctgcgagcgcagctagctgcaatggcttcctatattttgtcatctttttcgtggctgcttggtacatcaagggtcgggtagtccccttagctacctattccctcactggcctgtggtcctttagcctactgctcctagcattgccccaacaggcttatgcttatgacgcatctgtgcatggccagataggagcggctctgctggtaatgatcaccctcttcacactcaccccggggtataagaccctcctcggccagtgtctgtggtggttgtgctatctcctgaccctgggggaagccatgattcaggagtgggtaccacccatgcaggtgcgcggcggccgcgatggcatcgcgtgggccgtcactatattctgcccgggtgtggtgtttgacattaccaaatggcttttggcgttgcttgggcctgcttacctcttaagggccgctttgacacatgtgccgtacttcgtcagagctcacgctctgataagggtatgcgctttggtgaagcagctcgcggggggtaggtatgttcaggtggcgctattggcccttggcaggtggactggcacctacatctatgaccacctcacacctatgtcggactgggccgctagcggcctgcgcgacttagcggtcgccgtggaacccatcatcttcagtccgatggagaagaaggtcatcgtctggggagcggagacggctgcatgtggggacattctacatggacttcccgtgtccgcccgactcggccaggagatcctcctcggcccagctgatggctacacctccaaggggtggaagctccttgcgcctatcactgcttatgcccagcagacacgaggcctattgggcgccatagtggtgagcatgacgggccgtgacaagacagaacaggccggggagatccaggtcctctccacagtcactcaaaccttcctcgggactaccatctcaggagtcttgtggaccgtctaccacggggctggcaacaagaccctagccggctcgcggggcccggtcacacagatgtactccagcgccgagggagacttggtagggtggcccagtcctcccgggactaaatccatggagccgtgcacgtgcggagcggtcgacctgtacctggtcacgcggaacgctgacgtcatcccggctcggagacgcggggacaagcggggagcgttgctctccccgagacctctctcaactctgaaggggtcttcggggggaccggtgctctgccccaggggccacgttgtcgggatcttccgggcagccatatgctcgcggggcgtggccaagtccatagatttcatccccgttgaggcaattgacatcgtcacgcgctcccccacctttactgacaacagcacgccaccggctgtgccccagacctatcaggttggatacttgcacgccccgactggcagcgggaagagcaccaaagtccctgtcgcatatgccgcccaggggtataaggtgctagtgctcaatccctcggtggccgccaccttggggtttggggcgtacttggccaaggcgcacggcatcaatcctaacattaggactggagtcaggactgtgacgaccggggaggctattacgtattccacgtatggcaagtttctcgctgatgggggctgcgcaggcggcgcctatgacatcatcatatgcgatgagtgccatgccacggatgctaccacccttctcggcatcggaacagttcttgaccaagcagagtcagctggggtcaggctaactgtgctggccacggctacgcctcccggatcaataacaacccctcaccccaacatagaggaggtagctctcggacaggagggtgagatccccttctatgggagagcgatccccctggcccacatcaagggagggaggcacctgatcttctgccactcgaagaaaaagtgtgacgagctcgcggcggccctccgggccatgggcttgaacgctgtggcatactacagagggttggacgtctccataataccagctcaaggagacgtggtggttgtcgccactgacgccctcatgacagggtacactggagactttgactccgtgattgactgcaacgtagcggttactcaagtcgtggacttcagcttggaccccaccttcaccatatccacacaaaccgtcccccaagacgccgtctcacgcagccagcgccgggggcgcacgggcagagggagactgggcatttacaggtacgtttccactggtgagcgagcttcgggaatgtttgacagcgtaacgctctgcgagtgctacgatgcaggggctgcatggtatgatctcacaccagcggaaaccaccgtcaggcttagggcgtatttcaacacgcccggcctgcccgtgtgccaagaccacctcgagttttgggaggcagttttcaccggcctcacacacatagatgcccactacctttcccaaacaaagcaagcgggggagaatttcgcatacctgacagcctatcaggccacagtgtgtgccagagccaaagcccctcccccgtcttgggacgtcatgtggaagtgcctgactcgactcaaacccacgctcgtgggccccacacctctcctgtaccgcctgggttcagttaccaacgatgtcaccttcacacaccctgtgacaaagtacatcgctacttgcatgcaagctgacctcgaggtcatgaccagcacgtgggtcctagccgggggagtcctggctgccatcgccgcgtactgcttggcgactgggtgtgtttccatcatcggccgtttgcacgtcaaccagcgaaccgtcgttgcacctgacaaggaggtcctctatgaggcttttgacgagatggaggagtgtgcttccagagcggccctcattgaggaggcgcaacggatagccgagatgctgaagtctaagatccaaggcttattgcagcaggcttccaagcaggcccaggacatacaaccaaccgtgcaggcttcatggcccaaggtggagcaattctgggccaaacacatgtggaacttcattagcggcatccaatatcttgcgggactgtcaacgctgccagggaaccccgctgtggcctctatgatggcattcagtgccgccatcaccagtccgctgtcgactagcaccaccatccttctcaacatcatgggaggctggctggcgtctcaaattgcgccacccgcaggggccacaggcttcgtggtcagtggcctggtgggggctgccataggcagcgtaggcttgggtaaggtgctggtggacatcttggcagggtacggtgcgggcatttcgggggctctcgtcgcattcaagatcatgtctggcgagaagccctccatggaggatgtcatcaacctgctgcccggaatcctgtccccgggcgccctggtggtgggggtcatttgcgcggccattctgcgccgtcatgtgggaccgggggaaggtgcggtccaatggatgaataggcttattgcctttgcttccagaggaaaccacgtcgcccccacccactatgtgacggagtcagatgcgtcgcagcgcgtgacccaactacttggctctctcaccataactagcctgcttagaaggctccacaattggattactgaggactgccccaccccatgcaatggctcatggctccgcgatgtgtgggactgggtgtgcaccatcctgactgactttaaaaactggctgacctccaagttgttcccaaagctgcccggcctccccttcatctcttgccaaaaggggtataggggcgactgggccggcacgggcatcatggtcacgcggtgcccttgtggcgccaacatttctggcaatgtccgcttcggctctatgagaatcacagggcctaagacctgcatgaacacctggcaggggactttccctatcaactgctacacggagggccaatgcatgccgagacctgcgccaaactttaagaccgccatctggagggtggcggcctcagagtacgcggaggtgacgcggcacgggtcgtactcttacataacagggctgaccgctgacaatctgaaggttccctgccaaataccatctccagagttcttttcctgggtagacggagtacagatccacaggtttgctcccactccaaagccgttctttcgggatgaggtctcgttcagcgtggggctcaactcatttgtagtcgggtctcagcttccctgcgaccctgaacccgacgcggacgtgttgatgtccatgctaacagatcctggccatatcacggcagaggctgcagcgcggcgcttagcgcgggggtcacccccatctgaggcaagctcctcagcaagccagctgtcggccccgtcgctgcgttccaccagtgccacccacggcacggcctatgatgtggccatggtggatgctaacctgttcatgaagggggaagtgattcggatagagtccgattccaaagtggtcgttctggactctctcgacccactggccgaagaggtgagcgacgtcgaaccctctataccatcagagtacttgatccccaagaaacaattcccaccagccttgccggcctgggcgcggcctgactacaacccaccgcttgtggaatcgtggaggaagcctgactaccaaccacccactgtcgcgggctgtgctctccccccccccaagaagaccccgacgccccccccaaggaagcgtcggacggtgagactcagtgagagcgccgtgggagacatcctccaacagctggctattaagacctttggccagccccctccaagcggaggcccagacccccccacgggggcgggcgccgccggctccggcggtcagacgccccctgatgagccggctccttcggagacggattctgtctcctccatgcccccccttgagggggagcccggagacccagacctggagcttggccaggtagagccccaaccccccccccaggggggggaggcggctcccgactcagactctgggtcgtggtctacctgctccgaggaggaggattccaccgtgtgctgctccatgtcatactcctggaccggggcccttataactccttgcagccccgaagaggagaagttgccaatcaatcccctgagcaactcattgttgcgctaccacaacaaggtgtactgcactacatcaagaagtgcgtcactgagggccaaaaaggtaacttttgacaggatgcaagtactcgatgcccactatgactcagtcttaaaggacattaagctagcggcctccaaggtcagcgcaaggtccctcagcttggaggaggcgtgcaagctgaccccgccccactctgcgaggtccaaatatggatttggggctaaggaggtccgcagcttgtccgggagggccgtcaaccacatcaagtccgtgtggaaggacctcttggaagactcacaaacaccaatacctacaaccatcatggccaagaatgaggtgttctgcgtgaaccctgctaaggggggcaagaaagcagctcgcctcatcgtttaccccgaccttggtgtcagggtctgcgaaaagatggccctctatgatgttgcacaaaagcttcctcaggcggtgatgggggcctcctatgggttccagtactctcccgcccagcgggtggagtttctcttgaaagcgtgggcggacaagaaagaccctatgggtttttcgtatgatacccgatgctttgactcaactgtcactgagagagacataagaactgaggaggacatatacctgtcctgctccctacccgaggaggcccgcactgccatacactcgctgactgagagactttacgtgggagggcccatgttcaacagcaagggccagacctgcgggtacaggcgttgccgcgctagcggggtgctcaccactagcatggggaataccatcacatgctatgtaaaagccctagcggcctgcaaggccgcagggatagttgcacccacgatgctggtatgcggcgatgacttggttgtcatctcagaaagccaggggactgaggaggacgagcggaacctgagagccttcacggaggctatgaccaggtattctgcccctcctggtgacccccccagaccggaatacgacttggagctgataacatcctgctcctcaaatgtgtctgtggcacttggcccccggggcaaccgcagatactatctgaccagagaccccaccactccaatcgcccgggctgcctgggaaacagtcagacactcccctgtcaattcatggctgggaaacatcatccagtacgctccaaccatatgggttcgtatggtcctgatgacacatttctactccattctcatggcccaagacactctggaccagaaccttaactttgaaatgtatggagctgtgtactctgtaagtcccttggacctcccagccataattgaaaagctccatgggcttgacgctttctctctgcacacatactctcccaacgaactgacgcgagtggcttcagccctcagaaaacttggggcgccacccctcagagcgtggaagagccgggcgcgtgcagtcagagcgtccctcatctcccgtggagggagagcggccgtctgcggtcgatatctcttcaactgggcggtgaagaccaagctcaaactcactccattgccggaggcgcgccatctggatttatccagttggttcaccgtcggcgccggcgggggcgacatttatcacagcgtgtcgcgtgcccgaccccgcttgttactccctagcctactcctactctttgtaggagtaggccttttcctactccccgctcggtagagcggcacacattagctacactccatagctaactgttccattttttttttttttttttttttttttttttttttttttttttttttttttttttttttttttcttttccttcctttctttttcactttacttcattctttcctggtggctccatcttagccctagtcacggctagctgtgaaaggtccgtgagccgcatgactgcagagagtgccgtaactggtctctctgcagatcatgt

SEQ ID NO: 86 - DNA, 9530 bp, Artificial Sequence
  synthetic DNA: J6/JFH-2.1 A2217S(TI/MT/MK/NT/IV/SG/TA)
accggtgagtacaccggaattgccgggaagactgggtcctttcttggataaacccactctatgcccggccatttgggcgtgcccccgcaagactgctagccgagtagcgttgggttgcgaaaggccttgtggtactgcctgatagggtgcttgcgagtgccccgggaggtctcgtagaccgtgcaccatgagcacaaatcctaaacctcaaagaaaaaccaaaagaaacaccaaccgtcgcccacaagacgttaagtttccgggcggcggccagatcgttggcggagtatacttgttgccgcgcaggggccccaggttgggtgtgcgcgcgacaaggaagacttcggagcggtcccagccacgtggaaggcgccagcccatccctaaagatcggcgctccactggcaaatcctggggaaaaccaggatacccctggcccctatacgggaatgagggactcggctgggcaggatggctcctgtccccccgaggttcccgtccctcttggggccccaatgacccccggcataggtcgcgcaacgtgggtaaggtcatcgataccctaacgtgcggctttgccgacctcatggggtacatccctgtcgtgggcgccccgctcggcggcgtcgccagagctctcgcgcatggcgtgagagtcctggaggacggggttaattttgcaacagggaacttacccggttgctccttttctatcttcttgctggccctgctgtcctgcatcaccaccccggtctccgctgccgaagtgaagaacatcagtaccggctacatggtgactaacgactgcaccaatgacagcattacctggcagctccaggctgctgtcctccacgtccccgggtgcgtcccgtgcgagaaagtggggaatgcatctcagtgctggataccggtctcaccgaatgtggccgtgcagcggcccggcgccctcacgcagggcttgcggacgcacatcgacatggttgtgatgtccgccacgctctgctctgccctctacgtgggggacctctgcggtggggtgatgctcgcagcccaaatgttcattgtctcgccgcagcaccactggtttgtccaagactgcaattgctccatctaccctggtaccatcactggacaccgcatggcatgggacatgatgatgaactggtcgcccacggctaccatgatcttggcgtacgcgatgcgtgtccccgaggtcattatagacatcattagcggggctcattggggcgtcatgttcggcttggcctacttctctatgcagggagcgtgggcgaaagtcgttgtcatccttctgttggccgccggggtggacgcgcgcacccatactgttgggggttctgccgcgcagaccaccgggcgcctcaccagcttatttgacaagggccccaggcagaaaatccagctcgttaacaccactggcagctggcacatcaaccgcaccgccctgaactgcaatgactccttgcacaccggctttatcgcgtctctgttctacacccacagcttcaactcgtcaggatgtcccgaacgcatgtccgcctgccgcagtatcgaggccttccgggtgggatggggcgccttgcaatatgaggataatgtcaccaatccagaggatatgagaccctattgctggcactacccaccaaggcagtgtggcgtggtctccgcgaagactgtgtgtggcccagtgtactgtttcacccccagcccagtggtagtgggcacgaccgacaggcttggagcgcccacttacacgtggggggagaatgagacagatgtcttcctattgaacagcactcgaccaccgctggggtcatggttcggctgcacgtggatgaactcttctggctacaccaagacttgcggcgcaccaccctgccgtactagagctgacttcaacgccagcacggacctgttgtgccccacggactgttttaggaagcatcctgataccacttacctcaaatgcggctctgggccctggctcacgccaaggtgcctgatcgactacccctacaggctctggcattacccctgcacagttaactataccatcttcaaaataaggatgtatgtgggaggggttgagcacaggctcacggctgcatgcaatttcactcgtggggatcgttgcaacttggaggacagagacagaagtcaactgtctcctttgttgcactccaccacggaatgggccattttaccttgctcttactcggacctgcccgccttgtcgactggtcttctccacctccaccaaaacatcgtggacgtacaattcatgtatggcctatcacctgccctcacaaaatacatcgtccgatgggagtgggtaatactcttattcctgctcttagcggacgccagggtttgcgcctgcttatggatgctcatcttgttgggccaggccgaagcagcactagagaagctggtcatcttgcacgctgcgagcgcagctagctgcaatggcttcctatattttgtcatctttttcgtggctgcttggtacatcaagggtcgggtagtccccttagctacctattccctcactggcctgtggtcctttagcctactgctcctagcattgccccaacaggcttatgcttatgacgcatctgtgcatggccagataggagcggctctgctggtaatgatcaccctcttcacactcaccccggggtataagaccctcctcggccagtgtctgtggtggttgtgctatctcctgaccctgggggaagccatgattcaggagtgggtaccacccacgcaggtgcgcggcggccgcgatggcatcgcgtgggccgtcactatattctgcccgggtgtggtgtttgacattaccaaatggcttttggcgttgcttgggcctgcttacctcttaagggccgctttgacacatgtgccgtacttcgtcagagctcacgctctgataagggtatgcgctttggtgaagcagctcgcggggggtaggtatgttcaggtggcgctattggcccttggcaggtggactggcacctacatctatgaccacctcacacctatgtcggactgggccgctagcggcctgcgcgacttagcggtcgccgtggaacccatcatcttcagtccgatggagaagaaggtcatcgtctggggagcggagacggctgcatgtggggacattctacatggacttcccgtgtccgcccgactcggccaggagatcctcctcggcccagctgatggctacacctccaaggggtggaagctccttgcgcctatcactgcttatgcccagcagacacgaggcctattgggcgccatagtggtgagcatgacgggccgtgacaagacagaacaggccggggagatccaggtcctctccacagtcactcaaaccttcctcgggactaccatctcaggagtcttgtggaccgtctaccacggggctggcaacaagaccctagccggctcgcggggcccggtcacacagatgtactccagcgccgagggagacttggtagggtggcccagtcctcccgggactaaatccatggagccgtgcacgtgcggagcggtcgacctgtacctggtcacgcggaacgctgacgtcatcccggctcggagacgcggggacaagcggggagcgttgctctccccgagacctctctcaactctgaaggggtcttcggggggaccggtgctctgccccaggggccacgttgtcgggatcttccgggcagccatatgctcgcggggcgtggccaagtccatagatttcatccccgttgaggcaattgacatcgtcacgcgctcccccacctttactgacaacagcacgccaccggctgtgccccagacctatcaggttggatacttgcacgccccgactggcagcgggaagagcaccaaagtccctgtcgcatatgccgcccaggggtataaggtgctagtgctcaatccctcggtggccgccaccttggggtttggggcgtacttggccaaggcgcacggcatcaatcctaacattaggactggagtcaggactgtgacgaccggggaggctattacgtattccacgtatggcaagtttctcgctgatgggggctgcgcaggcggcgcctatgacatcatcatatgcgatgagtgccatgccacggatgctaccacccttctcggcatcggaacagttcttgaccaagcagagtcagctggggtcaggctaactgtgctggccacggctacgcctcccggatcaataacaacccctcaccccaacatagaggaggtagctctcggacaggagggtgagatccccttctatgggagagcgatccccctggcccacatcaagggagggaggcacctgatcttctgccactcgaagaaaaagtgtgacgagctcgcggcggccctccgggccatgggcttgaacgctgtggcatactacagagggttggacgtctccataataccagctcaaggagacgtggtggttgtcgccactgacgccctcatgacagggtacactggagactttgactccgtgattgactgcaacgtagcggttactcaagtcgtggacttcagcttggaccccaccttcaccatatccacacaaaccgtcccccaagacgccgtctcacgcagccagcgccgggggcgcacgggcagagggagactgggcatttacaggtacgtttccactggtgagcgagcttcgggaatgtttgacagcgtaacgctctgcgagtgctacgatgcaggggctgcatggtatgatctcacaccagcggaaaccaccgtcaggcttagggcgtatttcaacacgcccggcctgcccgtgtgccaagaccacctcgagttttgggaggcagttttcaccggcctcacacacatagatgcccactacctttcccaaacaaagcaagcgggggagaatttcgcatacctgacagcctatcaggccacagtgtgtgccagagccaaagcccctcccccgtcttgggacgtcatgtggaagtgcctgactcgactcaaacccacgctcgtgggccccacacctctcctgtaccgcctgggttcagttaccaacgatgtcaccttcgcacaccctgtgacaaagtacatcgctacttgcatgcaagctgacctcgaggtcatgaccagcacgtgggtcctagccgggggagtcctggctgccatcgccgcgtactgcttggcgactgggtgtgtttccatcatcggccgtttgcacgtcaaccagcgaaccgtcgttgcacctgacaaggaggtcctctatgaggcttttgacgagatggaggagtgtgcttccagagcggccctcgttgaggaggcgcaacggatagccgagatgctgaagtctaagatccaaggcttattgcagcaggcttccaagcaggcccaggacatacaaccaaccgtgcaggcttcatggcccaaggtggagcaattctgggccaaacacatgtggaacttcattagcggcatccaatatcttgcgggactgtcaacgctgccagggaaccccgctgtggcctctatgatggcattcagtgccgccatcaccagtccgctgtcgactagcaccaccatccttctcaacatcatgggaggctggctggcgtctcaaattgcgccacccgcaggggccacaggcttcgtggtcagtggcctggtgggggctgccataggcagcgtaggcttgggtaaggtgctggtggacatcttggcagggtacggtgcgggcatttcgggggctctcgtcgcattcaagatcatgtctggcgagaagccctccatggaggatgtcatcaacctgctgcccggaatcctgtccccgggcgccctggtggtgggggtcatttgcgcggccattctgcgccgtcatgtgggaccgggggaaggtgcggtccaatggatgaataggcttattgcctttgcttccagaggaaaccacgtcgcccccacccactatgtgacggagtcagatgcgtcgcagcgcgtgacccaactacttggctctctcaccataactagcctgcttagaaggctccacaattggattactgaggactgccccaccccatgcaatggctcatggctccgcgatgtgtgggactgggtgtgcaccatcctgactgactttaaaaactggctgacctccaagttgttcccaaagctgcccggcctccccttcatctcttgccaaaaggggtataggggcgactgggccggcacgggcatcatggtcacgcggtgcccttgtggcgccaacatttctggcaatgtccgcttcggctctatgagaatcacagggcctaagacctgcatgaacacctggcaggggactttccctatcaactgctacacggagggccaatgcatgccgagacctgcgccaaactttaagaccgccatctggagggtggcggcctcagagtacgcggaggtgacgcggcacgggtcgtactcttacataacagggctgaccgctgacaatctgaaggttccctgccaaataccatctccagagttcttttcctgggtagacggagtacagatccacaggtttgctcccactccaaagccgttctttcgggatgaggtctcgttcagcgtggggctcaactcatttgtagtcgggtctcagcttccctgcgaccctgaacccgacgcggacgtgttgatgtccatgctaacagatcctggccatatcacggcagaggctgcagcgcggcgcttagcgcgggggtcacccccatctgaggcaggctcctcagcaagccagctgtcggccccgtcgctgcgttccacctgtgccacccacggcacggcctatgatgtggccatggtggatgctaacctgttcatgaagggggaagtgattcggatagagtccgattccaaagtggtcgttctggactctctcgacccactggccgaagaggtgagcgacgtcgaaccctctataccatcagagtacttgatccccaagaaacaattcccaccagccttgccggcctgggcgcggcctgactacaacccaccgcttgtggaatcgtggaggaagcctgactaccaaccacccactgtcgcgggctgtgctctccccccccccaagaagaccccgacgccccccccaaggaagcgtcggacggtgagactcagtgagagcgccgtgggagacatcctccaacagctggctattaagacctttggccagccccctccaagcggaggcccagacccccccacgggggcgggcgccgccggctccggcggtcagacgccccctgatgagccggctccttcggagacggattctgtctcctccatgcccccccttgagggggagcccggagacccagacctggagcttggccaggtagagccccaaccccccccccaggggggggaggcggctcccgactcagactctgggtcgtggtctacctgctccgaggaggaggattccaccgtgtgctgctccatgtcatactcctggaccggggcccttataactccttgcagccccgaagaggagaagttgccaatcaatcccctgagcaactcattgttgcgctaccacaacaaggtgtactgcactacatcaagaagtgcgtcactgagggccaaaaaggtaacttttgacaggatgcaagtactcgatgcccactatgactcagtcttaaaggacattaagctagcggcctccaaggtcagcgcaaggtccctcagcttggaggaggcgtgcaagctgaccccgccccactctgcgaggtccaaatatggatttggggctaaggaggtccgcagcttgtccgggagggccgtcaaccacatcaagtccgtgtggaaggacctcttggaagactcacaaacaccaatacctacaaccatcatggccaagaatgaggtgttctgcgtgaaccctgctaaggggggcaagaaagcagctcgcctcatcgtttaccccgaccttggtgtcagggtctgcgaaaagatggccctctatgatgttgcacaaaagcttcctcaggcggtgatgggggcctcctatgggttccagtactctcccgcccagcgggtggagtttctcttgaaagcgtgggcggacaagaaagaccctatgggtttttcgtatgatacccgatgctttgactcaactgtcactgagagagacataagaactgaggaggacatatacctgtcctgctccctacccgaggaggcccgcactgccatacactcgctgactgagagactttacgtgggagggcccatgttcaacagcaagggccagacctgcgggtacaggcgttgccgcgctagcggggtgctcaccactagcatggggaataccatcacatgctatgtaaaagccctagcggcctgcaaggccgcagggatagttgcacccacgatgctggtatgcggcgatgacttggttgtcatctcagaaagccaggggactgaggaggacgagcggaacctgagagccttcacggaggctatgaccaggtattctgcccctcctggtgacccccccagaccggaatacgacttggagctgataacatcctgctcctcaaatgtgtctgtggcacttggcccccggggcaaccgcagatactatctgaccagagaccccaccactccaatcgcccgggctgcctgggaaacagtcagacactcccctgtcaattcatggctgggaaacatcatccagtacgctccaaccatatgggttcgtatggtcctgatgacacatttctactccattctcatggcccaagacactctggaccagaaccttaactttgaaatgtatggagctgtgtactctgtaagtcccttggacctcccagccataattgaaaagctccatgggcttgacgctttctctctgcacacatactctcccaacgaactgacgcgagtggcttcagccctcagaaaacttggggcgccacccctcagagcgtggaagagccgggcgcgtgcagtcagagcgtccctcatctcccgtggagggagagcggccgtctgcggtcgatatctcttcaactgggcggtgaagaccaagctcaaactcactccattgccggaggcgcgccatctggatttatccagttggttcaccgtcggcgccggcgggggcgacatttatcacagcgtgtcgcgtgcccgaccccgcttgttactccttagcctactcctactctttgtaggagtaggccttttcctactccccgctcggtagagcggcacacattagctacactccatagctaactgttccattttttttttttttttttttttttttttttttttttttttttttttttttttttttttttttcttttccttcctttctttttcactttacttcattctttcctggtggctccatcttagccctagtcacggctagctgtgaaaggtccgtgagccgcatgactgcagagagtgccgtaactggtctctctgcagatcatgt

SEQ ID NO: 87 - DNA, 9530 bp, Artificial Sequence
  synthetic DNA: J6/JFH-2.1 A2217S(AT/CS/TI/LP/MV/VG/IV/KR)
accggtgagtacaccggaattgccgggaagactgggtcctttcttggataaacccactctatgcccggccatttgggcgtgcccccgcaagactgctagccgagtagcgttgggttgcgaaaggccttgtggtactgcctgatagggtgcttgcgagtgccccgggaggtctcgtagaccgtgcaccatgagcacaaatcctaaacctcaaagaaaaaccaaaagaaacaccaaccgtcgcccacaagacgttaagtttccgggcggcggccagatcgttggcggagtatacttgttgccgcgcaggggccccaggttgggtgtgcgcgcgacaaggaagacttcggagcggtcccagccacgtggaaggcgccagcccatccctaaagatcggcgctccactggcaaatcctggggaaaaccaggatacccctggcccctatacgggaatgagggactcggctgggcaggatggctcctgtccccccgaggttcccgtccctcttggggccccaatgacccccggcataggtcgcgcaacgtgggtaaggtcatcgataccctaacgtgcggctttgccgacctcatggggtacatccctgtcgtgggcgccccgctcggcggcgtcaccagagctctcgcgcatggcgtgagagtcctggaggacggggttaattttgcaacagggaacttacccggttgctccttttctatcttcttgctggccctgctgtcctgcatcaccaccccggtctccgctgccgaagtgaagaacatcagtaccggctacatggtgactaacgactgcaccaatgacagcattacctggcagctccaggctgctgtcctccacgtccccgggtgcgtcccgtgcgagaaagtggggaatgcatctcagtgctggataccggtctcaccgaatgtggccgtgcagcggcccggcgccctcacgcagggcttgcggacgcacatcgacatggttgtgatgtccgccacgctctgctctgccctctacgtgggggacctctgcggtggggtgatgctcgcagcccaaatgttcattgtctcgccgcagcaccactggtttgtccaagactgcaattgctccatctaccctggtaccatcactggacaccgcatggcatgggacatgatgatgaactggtcgcccacggctaccatgatcttggcgtacgcgatgcgtgtccccgaggtcattatagacatcattagcggggctcattggggcgtcgtgttcggcttggcctacttctctatgcagggagcgtgggcgaaagtcgttgtcatccttctgttggccgccggggtggacgcgcgcacccatactgttgggggttctgccgcgcagaccaccgggcgcctcaccagcttatttgacatgggccccaggcagaaaatccagctcgttaacaccaatggcagctggcacatcaaccgcaccgccctgaactgcaatgactccttgcacaccggctttatcgcgtctctgttctacacccacagcttcaactcgtcaggatgtcccgaacgcatgtccgcctgccgcagtatcgaggccttccgggtgggatggggcgccttgcaatatgaggataatgtcaccaatccagaggatatgagaccctattgctggcactacccaccaaggcagtgtggcgtggtctccgcgaagactgtgtgtggcccagtgtactgtttcacccccagcccagtggtagtgggcacgaccgacaggcttggagcgcccacttacacgtggggggagaatgagacagatgtcttcctattgaacagcactcgaccaccgctggggtcatggttcggctgcacgtggatgaactcttctggctacaccaagacttgcggcgcaccaccctgccgtactagagctgacttcaacgccagcacggacctgttgtgccccacggactgttttaggaagcatcctgataccacttacctcaaatgcggctctgggccctggctcacgccaaggtgcctgatcgactacccctacaggctctggcattacccctgcacaggtaactataccatcttcaaaataaggatgtatgtgggaggggttgagcacaggctcacggctgcatgcaatttcactcgtggggatcgttgcaacttggaggacagagacagaagtcaactgtctcctttgttgcactccaccacggaatgggccattttaccttgctcttactcggacctgcccgccttgtcgactggtcttctccacctccaccaaaacatcgtggacgtacaattcatgtatggcctatcacctgccctcacaaaatacatcgtccgatgggagtgggtaatactcttattcctgctcttagcggacgccagggtttgcgcctgcttatggatgctcatcttgttgggccaggccgaagcagcactagagaagctggtcatcttgcacgctgcgagcgcagctagctgcaatggcttcctatattttgtcatctttttcgtggctgcttggtacatcaagggtcgggtagtccccttagctacctattccctcactggcctgtggtcctttagcctactgctcctagcattgccccaacaggcttatgcttatgacgcatctgtgcatggccagataggagcggctctgctggtaatgatcaccctcttcacactcaccccggggtataagaccctcctcggccagtgtctgtggtggttgtgctatctcctgaccctgggggaagccatgattcaggagtgggtaccacccatgcaggtgcgcggcggccgcgatggcatcgcgtgggccgtcactatattctgcccgggtgtggtgtttgacattaccaaatggcttttggcgttgcttgggcctgcttacctcttaagggccgctttgacacatgtgccgtacttcgtcagagctcacgctctgataagggtatgcgctttggtgaagcagctcgcggggggtaggtatgttcaggtggcgctattggcccttggcaggtggactggcacctacatctatgaccacctcacacctatgtcggactgggccgctagcggcctgcgcgacttagcggtcgccgtggaacccatcatcttcagtccgatggagaagaaggtcatcgtctggggagcggagacggctgcatgtggggacattctacatggacttcccgtgtccgcccgactcggccaggagatcctcctcggcccagctgatggctacacctccaaggggtggaagctccttgcgcctatcactgcttatgcccagcagacacgaggcctattgggcgccatagtggtgagcatgacgggccgtgacaagacagaacaggccggggagatccaggtcctctccacagtcactcaaaccttcctcgggactaccatctcaggagtcttgtggaccgtctaccacggggctggcaacaagaccctagccggctcgcggggcccggtcacacagatgtactccagcgccgagggagacttggtagggtggcccagtcctcccgggactaaatccatggagccgtgcacgtgcggagcggtcgacctgtacctggtcacgcggaacgctgacgtcatcccggctcggagacgcggggacaagcggggagcgttgctctccccgagacctctctcaactctgaaggggtcttcggggggaccggtgctctgccccaggggccacgttgtcgggatcttccgggcagccatatgctcgcggggcgtggccaagtccatagatttcatccccgttgaggcaattgacatcgtcacgcgctcccccacctttactgacaacagcacgccaccggctgtgccccagacctatcaggttggatacttgcacgccccgactggcagcgggaagagcaccaaagtccctgtcgcatatgccgcccaggggtataaggtgctagtgctcaatccctcggtggccgccaccttggggtttggggcgtacttggccaaggcgcacggcatcaatcctaacattaggactggagtcaggactgtgacgaccggggaggctattacgtattccacgtatggcaagtttctcgctgatgggggctgcgcaggcggcgcctatgacatcatcatatgcgatgagtgccatgccacggatgctaccacccttctcggcatcggaacagttcttgaccaagcagagtcagctggggtcaggctaactgtgctggccacggctacgcctcccggatcaataacaacccctcaccccaacatagaggaggtagctctcggacaggagggtgagatccccttctatgggagagcgatccccctggcccacatcaagggagggaggcacctgatcttctgccactcgaagaaaaagtgtgacgagctcgcggcggccctccgggccatgggcttgaacgctgtggcatactacagagggttggacgtctccataataccagctcaaggagacgtggtggttgtcgccactgacgccctcatgacagggtacactggagactttgactccgtgattgactgcaacgtagcggttactcaagtcgtggacttcagcttggaccccaccttcaccatatccacacaaaccgtcccccaagacgccgtctcacgcagccagcgccgggggcgcacgggcagagggagactgggcatttacaggtacgtttccactggtgagcgagcttcgggaatgtttgacagcgtaacgctctgcgagtgctacgatgcaggggctgcatggtatgatctcacaccagcggaaaccaccgtcaggcttagggcgtatttcaacacgcccggcctgcccgtgtgccaagaccacctcgagttttgggaggcagttttcaccggcctcacacacatagatgcccactacctttcccaaacaaagcaagcgggggagaatttcgcatacctgacagcctatcaggccacagtgtgtgccagagccaaagcccctcccccgtcttgggacgtcatgtggaagtgcctgactcgactcaaacccacgctcgtgggccccacacctctcctgtaccgcctgggttcagttaccaacgatgtcaccttcacacaccctgtgacaaagtacatcgctacttgcatgcaagctgacctcgaggtcatgaccagcacgtgggtcctagccgggggagtcctggctgccatcgccgcgtactgcttggcgactgggtgtgtttccatcgtcggccgtttgcacgtcaaccagcgaaccgtcgttgcacctgacaaggaggtcctctatgaggcttttgacgagatggaggagtgtgcttccagagcggccctcattgaggaggcgcaacggatagccgagatgctgaagtctaagatccaaggcttattgcagcaggcttccaagcaggcccaggacatacaaccaaccgtgcaggcttcatggcccaaggtggagcaattctgggccagacacatgtggaacttcattagcggcatccaatatcttgcgggactgtcaacgctgccagggaaccccgctgtggcctctatgatggcattcagtgccgccatcaccagtccgctgtcgactagcaccaccatccttctcaacatcatgggaggctggctggcgtctcaaattgcgccacccgcaggggccacaggcttcgtggtcagtggcctggtgggggctgccataggcagcgtaggcttgggtaaggtgctggtggacatcttggcagggtacggtgcgggcatttcgggggctctcgtcgcattcaagatcatgtctggcgagaagccctccatggaggatgtcatcaacctgctgcccggaatcctgtccccgggcgccctggtggtgggggtcatttgcgcggccattctgcgccgtcatgtgggaccgggggaaggtgcggtccaatggatgaataggcttattgcctttgcttccagaggaaaccacgtcgcccccacccactatgtgacggagtcagatgcgtcgcagcgcgtgacccaactacttggctctctcaccataactagcctgcttagaaggctccacaattggattactgaggactgccccaccccatgcaatggctcatggctccgcgatgtgtgggactgggtgtgcaccatcctgactgactttaaaaactggctgacctccaagttgttcccaaagctgcccggcctccccttcatctcttgccaaaaggggtataggggcgactgggccggcacgggcatcatggtcacgcggtgcccttgtggcgccaacatttctggcaatgtccgcttcggctctatgagaatcacagggcctaagacctgcatgaacacctggcaggggactttccctatcaactgctacacggagggccaatgcatgccgagacctgcgccaaactttaagaccgccatctggagggtggcggcctcagagtacgcggaggtgacgcggcacgggtcgtactcttacataacagggctgaccgctgacaatctgaaggttccctgccaaataccatctccagagttcttttcctgggtagacggagtacagatccacaggtttgctcccactccaaagccgttctttcgggatgaggtctcgttcagcgtggggctcaactcatttgtagtcgggtctcagcttccctgcgaccctgaacccgacgcggacgtgttgatgtccatgctaacagatcctggccatatcacggcagaggctgcagcgcggcgcttagcgcgggggtcacccccatctgaggcaagctcctcagcaagccagctgtcggccccgtcgctgcgttccaccagtgccacccacggcacggcctatgatgtggccatggtggatgctaacctgttcatgaagggggaagtgattcggatagagtccgattccaaagtggtcgttctggactctctcgacccactggccgaagaggtgagcgacgtcgaaccctctataccatcagagtacttgatccccaagaaacaattcccaccagccttgccggcctgggcgcggcctgactacaacccaccgcttgtggaatcgtggaggaagcctgactaccaaccacccactgtcgcgggctgtgctctccccccccccaagaagaccccgacgccccccccaaggaagcgtcggacggtgagactcagtgagagcgccgtgggagacatcctccaacagctggctattaagacctttggccagccccctccaagcggaggcccagacccccccacgggggcgggcgccgccggctccggcggtcagacgccccctgatgagccggctccttcggagacggattctgtctcctccatgcccccccttgagggggagcccggagacccagacctggagcttggccaggtagagccccaaccccccccccaggggggggaggcggctcccgactcagactctgggtcgtggtctacctgctccgaggaggaggattccaccgtgtgctgctccatgtcatactcctggaccggggcccttataactccttgcagccccgaagaggagaagttgccaatcaatcccctgagcaactcattgttgcgctaccacaacaaggtgtactgcactacatcaagaagtgcgtcactgagggccaaaaaggtaacttttgacaggatgcaagtactcgatgcccactatgactcagtcttaaaggacattaagctagcggcctccaaggtcagcgcaaggtccctcagcttggaggaggcgtgcaagctgaccccgccccactctgcgaggtccaaatatggatttggggctaaggaggtccgcagcttgtccgggagggccgtcaaccacatcaagtccgtgtggaaggacctcttggaagactcacaaacaccaatacctacaaccatcatggccaagaatgaggtgttctgcgtgaaccctgctaaggggggcaagaaagcagctcgcctcatcgtttaccccgaccttggtgtcagggtctgcgaaaagatggccctctatgatgttgcacaaaagcttcctcaggcggtgatgggggcctcctatgggttccagtactctcccgcccagcgggtggagtttctcttgaaagcgtgggcggacaagaaagaccctatgggtttttcgtatgatacccgatgctttgactcaactgtcactgagagagacataagaactgaggaggacatatacctgtcctgctccctacccgaggaggcccgcactgccatacactcgctgactgagagactttacgtgggagggcccatgttcaacagcaagggccagacctgcgggtacaggcgttgccgcgctagcggggtgctcaccactagcatggggaataccatcacatgctatgtaaaagccctagcggcctgcaaggccgcagggatagttgcacccacgatgctggtatgcggcgatgacttggttgtcatctcagaaagccaggggactgaggaggacgagcggaacctgagagccttcacggaggctatgaccaggtattctgcccctcctggtgacccccccagaccggaatacgacttggagctgataacatcctgctcctcaaatgtgtctgtggcacttggcccccggggcaaccgcagatactatctgaccagagaccccaccactccaatcgcccgggctgcctgggaaacagtcagacactcccctgtcaattcatggctgggaaacatcatccagtacgctccaaccatatgggttcgtatggtcctgatgacacatttctactccattctcatggcccaagacactctggaccagaaccttaactttgaaatgtatggagctgtgtactctgtaagtcccttggacctcccagccataattgaaaagctccatgggcttgacgctttctctctgcacacatactctcccaacgaactgacgcgagtggcttcagccctcagaaaacttggggcgccacccctcagagcgtggaagagccgggcgcgtgcagtcagagcgtccctcatctcccgtggagggagagcggccgtctgcggtcgatatctcttcaactgggcggtgaagaccaagctcaaactcactccattgccggaggcgcgccatctggatttatccagttggttcaccgtcggcgccggcgggggcgacatttatcacagcgtgtcgcgtgcccgaccccgcttgttactccctagcctactcctactctttgtaggagtaggccttttcctactccccgctcggtagagcggcacacattagctacactccatagctaactgttccattttttttttttttttttttttttttttttttttttttttttttttttttttttttttttttcttttccttcctttctttttcactttacttcattctttcctggtggctccatcttagccctagtcacggctagctgtgaaaggtccgtgagccgcatgactgcagagagtgccgtaactggtctctctgcagatcatgt

SEQ ID NO: 88 - protein, 3033 aa, Artificial Sequence
  synthetic polypeptide: J6/JFH-2.1 A2217S
MSTNPKPQRKTKRNTNRRPQDVKFPGGGQIVGGVYLLPRRGPRLGVRATRKTSERSQPRGRRQPIPKDRRSTGKSWGKPGYPWPLYGNEGLGWAGWLLSPRGSRPSWGPNDPRHRSRNVGKVIDTLTCGFADLMGYIPVVGAPLGGVARALAHGVRVLEDGVNFATGNLPGCSFSIFLLALLSCITTPVSAAEVKNISTGYMVTNDCTNDSITWQLQAAVLHVPGCVPCEKVGNASQCWIPVSPNVAVQRPGALTQGLRTHIDMVVMSATLCSALYVGDLCGGVMLAAQMFIVSPQHHWFVQDCNCSIYPGTITGHRMAWDMMMNWSPTATMILAYAMRVPEVIIDIISGAHWGVMFGLAYFSMQGAWAKVVVILLLAAGVDARTHTVGGSAAQTTGRLTSLFDMGPRQKIQLVNTNGSWHINRTALNCNDSLHTGFIASLFYTHSFNSSGCPERMSACRSIEAFRVGWGALQYEDNVTNPEDMRPYCWHYPPRQCGVVSAKTVCGPVYCFTPSPVVVGTTDRLGAPTYTWGENETDVFLLNSTRPPLGSWFGCTWMNSSGYTKTCGAPPCRTRADFNASTDLLCPTDCFRKHPDTTYLKCGSGPWLTPRCLIDYPYRLWHYPCTVNYTIFKIRMYVGGVEHRLTAACNFTRGDRCNLEDRDRSQLSPLLHSTTEWAILPCSYSDLPALSTGLLHLHQNIVDVQFMYGLSPALTKYIVRWEWVILLFLLLADARVCACLWMLILLGQAEAALEKLVILHAASAASCNGFLYFVIFFVAAWYIKGRVVPLATYSLTGLWSFSLLLLALPQQAYAYDASVHGQIGAALLVMITLFTLTPGYKTLLGQCLWWLCYLLTLGEAMIQEWVPPMQVRGGRDGIAWAVTIFCPGVVFDITKWLLALLGPAYLLRAALTHVPYFVRAHALIRVCALVKQLAGGRYVQVALLALGRWTGTYIYDHLTPMSDWAASGLRDLAVAVEPIIFSPMEKKVIVWGAETAACGDILHGLPVSARLGQEILLGPADGYTSKGWKLLAPITAYAQQTRGLLGAIVVSMTGRDKTEQAGEIQVLSTVTQTFLGTTISGVLWTVYHGAGNKTLAGSRGPVTQMYSSAEGDLVGWPSPPGTKSMEPCTCGAVDLYLVTRNADVIPARRRGDKRGALLSPRPLSTLKGSSGGPVLCPRGHVVGIFRAAICSRGVAKSIDFIPVEAIDIVTRSPTFTDNSTPPAVPQTYQVGYLHAPTGSGKSTKVPVAYAAQGYKVLVLNPSVAATLGFGAYLAKAHGINPNIRTGVRTVTTGEAITYSTYGKFLADGGCAGGAYDIIICDECHATDATTLLGIGTVLDQAESAGVRLTVLATATPPGSITTPHPNIEEVALGQEGEIPFYGRAIPLAHIKGGRHLIFCHSKKKCDELAAALRAMGLNAVAYYRGLDVSIIPAQGDVVVVATDALMTGYTGDFDSVIDCNVAVTQVVDFSLDPTFTISTQTVPQDAVSRSQRRGRTGRGRLGIYRYVSTGERASGMFDSVTLCECYDAGAAWYDLTPAETTVRLRAYFNTPGLPVCQDHLEFWEAVFTGLTHIDAHYLSQTKQAGENFAYLTAYQATVCARAKAPPPSWDVMWKCLTRLKPTLVGPTPLLYRLGSVTNDVTFTHPVTKYIATCMQADLEVMTSTWVLAGGVLAAIAAYCLATGCVSIIGRLHVNQRTVVAPDKEVLYEAFDEMEECASRAALIEEAQRIAEMLKSKIQGLLQQASKQAQDIQPTVQASWPKVEQFWAKHMWNFISGIQYLAGLSTLPGNPAVASMMAFSAAITSPLSTSTTILLNIMGGWLASQIAPPAGATGFVVSGLVGAAIGSVGLGKVLVDILAGYGAGISGALVAFKIMSGEKPSMEDVINLLPGILSPGALVVGVICAAILRRHVGPGEGAVQWMNRLIAFASRGNHVAPTHYVTESDASQRVTQLLGSLTITSLLRRLHNWITEDCPTPCNGSWLRDVWDWVCTILTDFKNWLTSKLFPKLPGLPFISCQKGYRGDWAGTGIMVTRCPCGANISGNVRFGSMRITGPKTCMNTWQGTFPINCYTEGQCMPRPAPNFKTAIWRVAASEYAEVTRHGSYSYITGLTADNLKVPCQIPSPEFFSWVDGVQIHRFAPTPKPFFRDEVSFSVGLNSFVVGSQLPCDPEPDADVLMSMLTDPGHITAEAAARRLARGSPPSEASSSASQLSAPSLRSTCATHGTAYDVAMVDANLFMKGEVIRIESDSKVVVLDSLDPLAEEVSDVEPSIPSEYLIPKKQFPPALPAWARPDYNPPLVESWRKPDYQPPTVAGCALPPPKKTPTPPPRKRRTVRLSESAVGDILQQLAIKTFGQPPPSGGPDPPTGAGAAGSGGQTPPDEPAPSETDSVSSMPPLEGEPGDPDLELGQVEPQPPPQGGEAAPDSDSGSWSTCSEEEDSTVCCSMSYSWTGALITPCSPEEEKLPINPLSNSLLRYHNKVYCTTSRSASLRAKKVTFDRMQVLDAHYDSVLKDIKLAASKVSARSLSLEEACKLTPPHSARSKYGFGAKEVRSLSGRAVNHIKSVWKDLLEDSQTPIPTTIMAKNEVFCVNPAKGGKKAARLIVYPDLGVRVCEKMALYDVAQKLPQAVMGASYGFQYSPAQRVEFLLKAWADKKDPMGFSYDTRCFDSTVTERDIRTEEDIYLSCSLPEEARTATHSLTERLYVGGPMFNSKGQTCGYRRCRASGVLTTSMGNTITCYVKALAACKAAGIVAPTMLVCGDDLVVISESQGTEEDERNLRAFTEAMTRYSAPPGDPPRPEYDLELITSCSSNVSVALGPRGNRRYYLTRDPTTPIARAAWETVRHSPVNSWLGNIIQYAPTIWVRMVLMTHFYSILMAQDTLDQNLNFEMYGAVYSVSPLDLPAIIEKLHGLDAFSLHTYSPNELTRVASALRKLGAPPLRAWKSRARAVRASLISRGGRAAVCGRYLFNWAVKTKLKLTPLPEARHLDLSSWFTVGAGGGDIYHSVSRARPRLLLLSLLLLFVGVGLFLLPAR

SEQ ID NO: 89 - protein, 3033 aa, Artificial Sequence
  synthetic polypeptide: J6/JFH-2.1 A2217S(CS)
MSTNPKPQRKTKRNTNRRPQDVKFPGGGQIVGGVYLLPRRGPRLGVRATRKTSERSQPRGRRQPIPKDRRSTGKSWGKPGYPWPLYGNEGLGWAGWLLSPRGSRPSWGPNDPRHRSRNVGKVIDTLTCGFADLMGYIPVVGAPLGGVARALAHGVRVLEDGVNFATGNLPGCSFSIFLLALLSCITTPVSAAEVKNISTGYMVTNDCTNDSITWQLQAAVLHVPGCVPCEKVGNASQCWIPVSPNVAVQRPGALTQGLRTHIDMVVMSATLCSALYVGDLCGGVMLAAQMFIVSPQHHWFVQDCNCSIYPGTITGHRMAWDMMMNWSPTATMILAYAMRVPEVIIDIISGAHWGVMFGLAYFSMQGAWAKVVVILLLAAGVDARTHTVGGSAAQTTGRLTSLFDMGPRQKIQLVNTNGSWHINRTALNCNDSLHTGFIASLFYTHSFNSSGCPERMSACRSIEAFRVGWGALQYEDNVTNPEDMRPYCWHYPPRQCGVVSAKTVCGPVYCFTPSPVVVGTTDRLGAPTYTWGENETDVFLLNSTRPPLGSWFGCTWMNSSGYTKTCGAPPCRTRADFNASTDLLCPTDCFRKHPDTTYLKCGSGPWLTPRCLIDYPYRLWHYPCTVNYTIFKIRMYVGGVEHRLTAACNFTRGDRCNLEDRDRSQLSPLLHSTTEWAILPCSYSDLPALSTGLLHLHQNIVDVQFMYGLSPALTKYIVRWEWVILLFLLLADARVCACLWMLILLGQAEAALEKLVILHAASAASCNGFLYFVIFFVAAWYIKGRVVPLATYSLTGLWSFSLLLLALPQQAYAYDASVHGQIGAALLVMITLFTLTPGYKTLLGQCLWWLCYLLTLGEAMIQEWVPPMQVRGGRDGIAWAVTIFCPGVVFDITKWLLALLGPAYLLRAALTHVPYFVRAHALIRVCALVKQLAGGRYVQVALLALGRWTGTYIYDHLTPMSDWAASGLRDLAVAVEPIIFSPMEKKVIVWGAETAACGDILHGLPVSARLGQEILLGPADGYTSKGWKLLAPITAYAQQTRGLLGAIVVSMTGRDKTEQAGEIQVLSTVTQTFLGTTISGVLWTVYHGAGNKTLAGSRGPVTQMYSSAEGDLVGWPSPPGTKSMEPCTCGAVDLYLVTRNADVIPARRRGDKRGALLSPRPLSTLKGSSGGPVLCPRGHVVGIFRAAICSRGVAKSIDFIPVEAIDIVTRSPTFTDNSTPPAVPQTYQVGYLHAPTGSGKSTKVPVAYAAQGYKVLVLNPSVAATLGFGAYLAKAHGINPNIRTGVRTVTTGEAITYSTYGKFLADGGCAGGAYDIIICDECHATDATTLLGIGTVLDQAESAGVRLTVLATATPPGSITTPHPNIEEVALGQEGEIPFYGRAIPLAHIKGGRHLIFCHSKKKCDELAAALRAMGLNAVAYYRGLDVSIIPAQGDVVVVATDALMTGYTGDFDSVIDCNVAVTQVVDFSLDPTFTISTQTVPQDAVSRSQRRGRTGRGRLGIYRYVSTGERASGMFDSVTLCECYDAGAAWYDLTPAETTVRLRAYFNTPGLPVCQDHLEFWEAVFTGLTHIDAHYLSQTKQAGENFAYLTAYQATVCARAKAPPPSWDVMWKCLTRLKPTLVGPTPLLYRLGSVTNDVTFTHPVTKYIATCMQADLEVMTSTWVLAGGVLAAIAAYCLATGCVSIIGRLHVNQRTVVAPDKEVLYEAFDEMEECASRAALIEEAQRIAEMLKSKIQGLLQQASKQAQDIQPTVQASWPKVEQFWAKHMWNFISGIQYLAGLSTLPGNPAVASMMAFSAAITSPLSTSTTILLNIMGGWLASQIAPPAGATGFVVSGLVGAAIGSVGLGKVLVDILAGYGAGISGALVAFKIMSGEKPSMEDVINLLPGILSPGALVVGVICAAILRRHVGPGEGAVQWMNRLIAFASRGNHVAPTHYVTESDASQRVTQLLGSLTITSLLRRLHNWITEDCPTPCNGSWLRDVWDWVCTILTDFKNWLTSKLFPKLPGLPFISCQKGYRGDWAGTGIMVTRCPCGANISGNVRFGSMRITGPKTCMNTWQGTFPINCYTEGQCMPRPAPNFKTAIWRVAASEYAEVTRHGSYSYITGLTADNLKVPCQIPSPEFFSWVDGVQIHRFAPTPKPFFRDEVSFSVGLNSFVVGSQLPCDPEPDADVLMSMLTDPGHITAEAAARRLARGSPPSEASSSASQLSAPSLRSTSATHGTAYDVAMVDANLFMKGEVIRIESDSKVVVLDSLDPLAEEVSDVEPSIPSEYLIPKKQFPPALPAWARPDYNPPLVESWRKPDYQPPTVAGCALPPPKKTPTPPPRKRRTVRLSESAVGDILQQLAIKTFGQPPPSGGPDPPTGAGAAGSGGQTPPDEPAPSETDSVSSMPPLEGEPGDPDLELGQVEPQPPPQGGEAAPDSDSGSWSTCSEEEDSTVCCSMSYSWTGALITPCSPEEEKLPINPLSNSLLRYHNKVYCTTSRSASLRAKKVTFDRMQVLDAHYDSVLKDIKLAASKVSARSLSLEEACKLTPPHSARSKYGFGAKEVRSLSGRAVNHIKSVWKDLLEDSQTPIPTTIMAKNEVFCVNPAKGGKKAARLIVYPDLGVRVCEKMALYDVAQKLPQAVMGASYGFQYSPAQRVEFLLKAWADKKDPMGFSYDTRCFDSTVTERDIRTEEDIYLSCSLPEEARTATHSLTERLYVGGPMFNSKGQTCGYRRCRASGVLTTSMGNTITCYVKALAACKAAGIVAPTMLVCGDDLVVISESQGTEEDERNLRAFTEAMTRYSAPPGDPPRPEYDLELITSCSSNVSVALGPRGNRRYYLTRDPTTPIARAAWETVRHSPVNSWLGNIIQYAPTIWVRMVLMTHFYSILMAQDTLDQNLNFEMYGAVYSVSPLDLPAIIEKLHGLDAFSLHTYSPNELTRVASALRKLGAPPLRAWKSRARAVRASLISRGGRAAVCGRYLFNWAVKTKLKLTPLPEARHLDLSSWFTVGAGGGDIYHSVSRARPRLLLLSLLLLFVGVGLFLLPAR

SEQ ID NO: 90 - protein, 3033 aa, Artificial Sequence
  synthetic polypeptide: J6/JFH-2.1 A2217S(LP)
MSTNPKPQRKTKRNTNRRPQDVKFPGGGQIVGGVYLLPRRGPRLGVRATRKTSERSQPRGRRQPIPKDRRSTGKSWGKPGYPWPLYGNEGLGWAGWLLSPRGSRPSWGPNDPRHRSRNVGKVIDTLTCGFADLMGYIPVVGAPLGGVARALAHGVRVLEDGVNFATGNLPGCSFSIFLLALLSCITTPVSAAEVKNISTGYMVTNDCTNDSITWQLQAAVLHVPGCVPCEKVGNASQCWIPVSPNVAVQRPGALTQGLRTHIDMVVMSATLCSALYVGDLCGGVMLAAQMFIVSPQHHWFVQDCNCSIYPGTITGHRMAWDMMMNWSPTATMILAYAMRVPEVIIDIISGAHWGVMFGLAYFSMQGAWAKVVVILLLAAGVDARTHTVGGSAAQTTGRLTSLFDMGPRQKIQLVNTNGSWHINRTALNCNDSLHTGFIASLFYTHSFNSSGCPERMSACRSIEAFRVGWGALQYEDNVTNPEDMRPYCWHYPPRQCGVVSAKTVCGPVYCFTPSPVVVGTTDRLGAPTYTWGENETDVFLLNSTRPPLGSWFGCTWMNSSGYTKTCGAPPCRTRADFNASTDLLCPTDCFRKHPDTTYLKCGSGPWLTPRCLIDYPYRLWHYPCTVNYTIFKIRMYVGGVEHRLTAACNFTRGDRCNLEDRDRSQLSPLLHSTTEWAILPCSYSDLPALSTGLLHLHQNIVDVQFMYGLSPALTKYIVRWEWVILLFLLLADARVCACLWMLILLGQAEAALEKLVILHAASAASCNGFLYFVIFFVAAWYIKGRVVPLATYSLTGLWSFSLLLLALPQQAYAYDASVHGQIGAALLVMITLFTLTPGYKTLLGQCLWWLCYLLTLGEAMIQEWVPPMQVRGGRDGIAWAVTIFCPGVVFDITKWLLALLGPAYLLRAALTHVPYFVRAHALIRVCALVKQLAGGRYVQVALLALGRWTGTYIYDHLTPMSDWAASGLRDLAVAVEPIIFSPMEKKVIVWGAETAACGDILHGLPVSARLGQEILLGPADGYTSKGWKLLAPITAYAQQTRGLLGAIVVSMTGRDKTEQAGEIQVLSTVTQTFLGTTISGVLWTVYHGAGNKTLAGSRGPVTQMYSSAEGDLVGWPSPPGTKSMEPCTCGAVDLYLVTRNADVIPARRRGDKRGALLSPRPLSTLKGSSGGPVLCPRGHVVGIFRAAICSRGVAKSIDFIPVEAIDIVTRSPTFTDNSTPPAVPQTYQVGYLHAPTGSGKSTKVPVAYAAQGYKVLVLNPSVAATLGFGAYLAKAHGINPNIRTGVRTVTTGEAITYSTYGKFLADGGCAGGAYDIIICDECHATDATTLLGIGTVLDQAESAGVRLTVLATATPPGSITTPHPNIEEVALGQEGEIPFYGRAIPLAHIKGGRHLIFCHSKKKCDELAAALRAMGLNAVAYYRGLDVSIIPAQGDVVVVATDALMTGYTGDFDSVIDCNVAVTQVVDFSLDPTFTISTQTVPQDAVSRSQRRGRTGRGRLGIYRYVSTGERASGMFDSVTLCECYDAGAAWYDLTPAETTVRLRAYFNTPGLPVCQDHLEFWEAVFTGLTHIDAHYLSQTKQAGENFAYLTAYQATVCARAKAPPPSWDVMWKCLTRLKPTLVGPTPLLYRLGSVTNDVTFTHPVTKYIATCMQADLEVMTSTWVLAGGVLAAIAAYCLATGCVSIIGRLHVNQRTVVAPDKEVLYEAFDEMEECASRAALIEEAQRIAEMLKSKIQGLLQQASKQAQDIQPTVQASWPKVEQFWAKHMWNFISGIQYLAGLSTLPGNPAVASMMAFSAAITSPLSTSTTILLNIMGGWLASQIAPPAGATGFVVSGLVGAAIGSVGLGKVLVDILAGYGAGISGALVAFKIMSGEKPSMEDVINLLPGILSPGALVVGVICAAILRRHVGPGEGAVQWMNRLIAFASRGNHVAPTHYVTESDASQRVTQLLGSLTITSLLRRLHNWITEDCPTPCNGSWLRDVWDWVCTILTDFKNWLTSKLFPKLPGLPFISCQKGYRGDWAGTGIMVTRCPCGANISGNVRFGSMRITGPKTCMNTWQGTFPINCYTEGQCMPRPAPNFKTAIWRVAASEYAEVTRHGSYSYITGLTADNLKVPCQIPSPEFFSWVDGVQIHRFAPTPKPFFRDEVSFSVGLNSFVVGSQLPCDPEPDADVLMSMLTDPGHITAEAAARRLARGSPPSEASSSASQLSAPSLRSTCATHGTAYDVAMVDANLFMKGEVIRIESDSKVVVLDSLDPLAEEVSDVEPSIPSEYLIPKKQFPPALPAWARPDYNPPLVESWRKPDYQPPTVAGCALPPPKKTPTPPPRKRRTVRLSESAVGDILQQLAIKTFGQPPPSGGPDPPTGAGAAGSGGQTPPDEPAPSETDSVSSMPPLEGEPGDPDLELGQVEPQPPPQGGEAAPDSDSGSWSTCSEEEDSTVCCSMSYSWTGALITPCSPEEEKLPINPLSNSLLRYHNKVYCTTSRSASLRAKKVTFDRMQVLDAHYDSVLKDIKLAASKVSARSLSLEEACKLTPPHSARSKYGFGAKEVRSLSGRAVNHIKSVWKDLLEDSQTPIPTTIMAKNEVFCVNPAKGGKKAARLIVYPDLGVRVCEKMALYDVAQKLPQAVMGASYGFQYSPAQRVEFLLKAWADKKDPMGFSYDTRCFDSTVTERDIRTEEDIYLSCSLPEEARTATHSLTERLYVGGPMFNSKGQTCGYRRCRASGVLTTSMGNTITCYVKALAACKAAGIVAPTMLVCGDDLVVISESQGTEEDERNLRAFTEAMTRYSAPPGDPPRPEYDLELITSCSSNVSVALGPRGNRRYYLTRDPTTPIARAAWETVRHSPVNSWLGNIIQYAPTIWVRMVLMTHFYSILMAQDTLDQNLNFEMYGAVYSVSPLDLPAIIEKLHGLDAFSLHTYSPNELTRVASALRKLGAPPLRAWKSRARAVRASLISRGGRAAVCGRYLFNWAVKTKLKLTPLPEARHLDLSSWFTVGAGGGDIYHSVSRARPRLLLPSLLLLFVGVGLFLLPAR

SEQ ID NO: 91 - protein, 3033 aa, Artificial Sequence
  synthetic polypeptide: J6/JFH-2.1 A2217S(TI)
MSTNPKPQRKTKRNTNRRPQDVKFPGGGQIVGGVYLLPRRGPRLGVRATRKTSERSQPRGRRQPIPKDRRSTGKSWGKPGYPWPLYGNEGLGWAGWLLSPRGSRPSWGPNDPRHRSRNVGKVIDTLTCGFADLMGYIPVVGAPLGGVARALAHGVRVLEDGVNFATGNLPGCSFSIFLLALLSCITTPVSAAEVKNISTGYMVTNDCTNDSITWQLQAAVLHVPGCVPCEKVGNASQCWIPVSPNVAVQRPGALTQGLRTHIDMVVMSATLCSALYVGDLCGGVMLAAQMFIVSPQHHWFVQDCNCSIYPGTITGHRMAWDMMMNWSPTATMILAYAMRVPEVIIDIISGAHWGVMFGLAYFSMQGAWAKVVVILLLAAGVDARTHTVGGSAAQTTGRLTSLFDMGPRQKIQLVNTNGSWHINRTALNCNDSLHTGFIASLFYTHSFNSSGCPERMSACRSIEAFRVGWGALQYEDNVTNPEDMRPYCWHYPPRQCGVVSAKTVCGPVYCFTPSPVVVGTTDRLGAPTYTWGENETDVFLLNSTRPPLGSWFGCTWMNSSGYTKTCGAPPCRTRADFNASTDLLCPTDCFRKHPDTTYLKCGSGPWLTPRCLIDYPYRLWHYPCTVNYTIFKIRMYVGGVEHRLTAACNFTRGDRCNLEDRDRSQLSPLLHSTTEWAILPCSYSDLPALSTGLLHLHQNIVDVQFMYGLSPALTKYIVRWEWVILLFLLLADARVCACLWMLILLGQAEAALEKLVILHAASAASCNGFLYFVIFFVAAWYIKGRVVPLATYSLTGLWSFSLLLLALPQQAYAYDASVHGQIGAALLVMITLFTLTPGYKTLLGQCLWWLCYLLTLGEAMIQEWVPPMQVRGGRDGIAWAVTIFCPGVVFDITKWLLALLGPAYLLRAALTHVPYFVRAHALIRVCALVKQLAGGRYVQVALLALGRWTGTYIYDHLTPMSDWAASGLRDLAVAVEPIIFSPMEKKVIVWGAETAACGDILHGLPVSARLGQEILLGPADGYTSKGWKLLAPITAYAQQTRGLLGAIVVSMTGRDKTEQAGEIQVLSTVTQTFLGTTISGVLWTVYHGAGNKTLAGSRGPVTQMYSSAEGDLVGWPSPPGTKSMEPCTCGAVDLYLVTRNADVIPARRRGDKRGALLSPRPLSTLKGSSGGPVLCPRGHVVGIFRAAICSRGVAKSIDFIPVEAIDIVTRSPTFTDNSTPPAVPQTYQVGYLHAPTGSGKSTKVPVAYAAQGYKVLVLNPSVAATLGFGAYLAKAHGINPNIRTGVRTVTTGEAITYSTYGKFLADGGCAGGAYDIIICDECHATDATTLLGIGTVLDQAESAGVRLTVLATATPPGSITTPHPNIEEVALGQEGEIPFYGRAIPLAHIKGGRHLIFCHSKKKCDELAAALRAMGLNAVAYYRGLDVSIIPAQGDVVVVATDALMTGYTGDFDSVIDCNVAVTQVVDFSLDPTFTISTQTVPQDAVSRSQRRGRTGRGRLGIYRYVSTGERASGMFDSVTLCECYDAGAAWYDLTPAETTVRLRAYFNTPGLPVCQDHLEFWEAVFTGLTHIDAHYLSQTKQAGENFAYLTAYQATVCARAKAPPPSWDVMWKCLTRLKPTLVGPTPLLYRLGSVTNDVTFTHPVTKYIATCMQADLEVMTSTWVLAGGVLAAIAAYCLATGCVSIIGRLHVNQRTVVAPDKEVLYEAFDEMEECASRAALIEEAQRIAEMLKSKIQGLLQQASKQAQDIQPTVQASWPKVEQFWAKHMWNFISGIQYLAGLSTLPGNPAVASMMAFSAAITSPLSTSTTILLNIMGGWLASQIAPPAGATGFVVSGLVGAAIGSVGLGKVLVDILAGYGAGISGALVAFKIMSGEKPSMEDVINLLPGILSPGALVVGVICAAILRRHVGPGEGAVQWMNRLIAFASRGNHVAPTHYVTESDASQRVTQLLGSLTITSLLRRLHNWITEDCPTPCNGSWLRDVWDWVCTILTDFKNWLTSKLFPKLPGLPFISCQKGYRGDWAGTGIMVTRCPCGANISGNVRFGSMRITGPKTCMNTWQGTFPINCYTEGQCMPRPAPNFKTAIWRVAASEYAEVTRHGSYSYITGLTADNLKVPCQIPSPEFFSWVDGVQIHRFAPTPKPFFRDEVSFSVGLNSFVVGSQLPCDPEPDADVLMSMLTDPGHITAEAAARRLARGSPPSEASSSASQLSAPSLRSTCATHGTAYDVAMVDANLFMKGEVIRIESDSKVVVLDSLDPLAEEVSDVEPSIPSEYLIPKKQFPPALPAWARPDYNPPLVESWRKPDYQPPTVAGCALPPPKKTPTPPPRKRRTVRLSESAVGDILQQLAIKTFGQPPPSGGPDPPTGAGAAGSGGQTPPDEPAPSETDSVSSMPPLEGEPGDPDLELGQVEPQPPPQGGEAAPDSDSGSWSTCSEEEDSTVCCSMSYSWTGALITPCSPEEEKLPINPLSNSLLRYHNKVYCTTSRSASLRAKKVTFDRMQVLDAHYDSVLKDIKLAASKVSARSLSLEEACKLTPPHSARSKYGFGAKEVRSLSGRAVNHIKSVWKDLLEDSQTPIPTTIMAKNEVFCVNPAKGGKKAARLIVYPDLGVRVCEKMALYDVAQKLPQAVMGASYGFQYSPAQRVEFLLKAWADKKDPMGFSYDTRCFDSTVTERDIRTEEDIYLSCSLPEEARTAIHSLTERLYVGGPMFNSKGQTCGYRRCRASGVLTTSMGNTITCYVKALAACKAAGIVAPTMLVCGDDLVVISESQGTEEDERNLRAFTEAMTRYSAPPGDPPRPEYDLELITSCSSNVSVALGPRGNRRYYLTRDPTTPIARAAWETVRHSPVNSWLGNIIQYAPTIWVRMVLMTHFYSILMAQDTLDQNLNFEMYGAVYSVSPLDLPAIIEKLHGLDAFSLHTYSPNELTRVASALRKLGAPPLRAWKSRARAVRASLISRGGRAAVCGRYLFNWAVKTKLKLTPLPEARHLDLSSWFTVGAGGGDIYHSVSRARPRLLLLSLLLLFVGVGLFLLPAR

SEQ ID NO: 92 - protein, 3033 aa, Artificial Sequence
  synthetic polypeptide: J6/JFH-2.1 A2217S(CS/LP)
MSTNPKPQRKTKRNTNRRPQDVKFPGGGQIVGGVYLLPRRGPRLGVRATRKTSERSQPRGRRQPIPKDRRSTGKSWGKPGYPWPLYGNEGLGWAGWLLSPRGSRPSWGPNDPRHRSRNVGKVIDTLTCGFADLMGYIPVVGAPLGGVARALAHGVRVLEDGVNFATGNLPGCSFSIFLLALLSCITTPVSAAEVKNISTGYMVTNDCTNDSITWQLQAAVLHVPGCVPCEKVGNASQCWIPVSPNVAVQRPGALTQGLRTHIDMVVMSATLCSALYVGDLCGGVMLAAQMFIVSPQHHWFVQDCNCSIYPGTITGHRMAWDMMMNWSPTATMILAYAMRVPEVIIDIISGAHWGVMFGLAYFSMQGAWAKVVVILLLAAGVDARTHTVGGSAAQTTGRLTSLFDMGPRQKIQLVNTNGSWHINRTALNCNDSLHTGFIASLFYTHSFNSSGCPERMSACRSIEAFRVGWGALQYEDNVTNPEDMRPYCWHYPPRQCGVVSAKTVCGPVYCFTPSPVVVGTTDRLGAPTYTWGENETDVFLLNSTRPPLGSWFGCTWMNSSGYTKTCGAPPCRTRADFNASTDLLCPTDCFRKHPDTTYLKCGSGPWLTPRCLIDYPYRLWHYPCTVNYTIFKIRMYVGGVEHRLTAACNFTRGDRCNLEDRDRSQLSPLLHSTTEWAILPCSYSDLPALSTGLLHLHQNIVDVQFMYGLSPALTKYIVRWEWVILLFLLLADARVCACLWMLILLGQAEAALEKLVILHAASAASCNGFLYFVIFFVAAWYIKGRVVPLATYSLTGLWSFSLLLLALPQQAYAYDASVHGQIGAALLVMITLFTLTPGYKTLLGQCLWWLCYLLTLGEAMIQEWVPPMQVRGGRDGIAWAVTIFCPGVVFDITKWLLALLGPAYLLRAALTHVPYFVRAHALIRVCALVKQLAGGRYVQVALLALGRWTGTYIYDHLTPMSDWAASGLRDLAVAVEPIIFSPMEKKVIVWGAETAACGDILHGLPVSARLGQEILLGPADGYTSKGWKLLAPITAYAQQTRGLLGAIVVSMTGRDKTEQAGEIQVLSTVTQTFLGTTISGVLWTVYHGAGNKTLAGSRGPVTQMYSSAEGDLVGWPSPPGTKSMEPCTCGAVDLYLVTRNADVIPARRRGDKRGALLSPRPLSTLKGSSGGPVLCPRGHVVGIFRAAICSRGVAKSIDFIPVEAIDIVTRSPTFTDNSTPPAVPQTYQVGYLHAPTGSGKSTKVPVAYAAQGYKVLVLNPSVAATLGFGAYLAKAHGINPNIRTGVRTVTTGEAITYSTYGKFLADGGCAGGAYDIIICDECHATDATTLLGIGTVLDQAESAGVRLTVLATATPPGSITTPHPNIEEVALGQEGEIPFYGRAIPLAHIKGGRHLIFCHSKKKCDELAAALRAMGLNAVAYYRGLDVSIIPAQGDVVVVATDALMTGYTGDFDSVIDCNVAVTQVVDFSLDPTFTISTQTVPQDAVSRSQRRGRTGRGRLGIYRYVSTGERASGMFDSVTLCECYDAGAAWYDLTPAETTVRLRAYFNTPGLPVCQDHLEFWEAVFTGLTHIDAHYLSQTKQAGENFAYLTAYQATVCARAKAPPPSWDVMWKCLTRLKPTLVGPTPLLYRLGSVTNDVTFTHPVTKYIATCMQADLEVMTSTWVLAGGVLAAIAAYCLATGCVSIIGRLHVNQRTVVAPDKEVLYEAFDEMEECASRAALIEEAQRIAEMLKSKIQGLLQQASKQAQDIQPTVQASWPKVEQFWAKHMWNFISGIQYLAGLSTLPGNPAVASMMAFSAAITSPLSTSTTILLNIMGGWLASQIAPPAGATGFVVSGLVGAAIGSVGLGKVLVDILAGYGAGISGALVAFKIMSGEKPSMEDVINLLPGILSPGALVVGVICAAILRRHVGPGEGAVQWMNRLIAFASRGNHVAPTHYVTESDASQRVTQLLGSLTITSLLRRLHNWITEDCPTPCNGSWLRDVWDWVCTILTDFKNWLTSKLFPKLPGLPFISCQKGYRGDWAGTGIMVTRCPCGANISGNVRFGSMRITGPKTCMNTWQGTFPINCYTEGQCMPRPAPNFKTAIWRVAASEYAEVTRHGSYSYITGLTADNLKVPCQIPSPEFFSWVDGVQIHRFAPTPKPFFRDEVSFSVGLNSFVVGSQLPCDPEPDADVLMSMLTDPGHITAEAAARRLARGSPPSEASSSASQLSAPSLRSTSATHGTAYDVAMVDANLFMKGEVIRIESDSKVVVLDSLDPLAEEVSDVEPSIPSEYLIPKKQFPPALPAWARPDYNPPLVESWRKPDYQPPTVAGCALPPPKKTPTPPPRKRRTVRLSESAVGDILQQLAIKTFGQPPPSGGPDPPTGAGAAGSGGQTPPDEPAPSETDSVSSMPPLEGEPGDPDLELGQVEPQPPPQGGEAAPDSDSGSWSTCSEEEDSTVCCSMSYSWTGALITPCSPEEEKLPINPLSNSLLRYHNKVYCTTSRSASLRAKKVTFDRMQVLDAHYDSVLKDIKLAASKVSARSLSLEEACKLTPPHSARSKYGFGAKEVRSLSGRAVNHIKSVWKDLLEDSQTPIPTTIMAKNEVFCVNPAKGGKKAARLIVYPDLGVRVCEKMALYDVAQKLPQAVMGASYGFQYSPAQRVEFLLKAWADKKDPMGFSYDTRCFDSTVTERDIRTEEDIYLSCSLPEEARTATHSLTERLYVGGPMFNSKGQTCGYRRCRASGVLTTSMGNTITCYVKALAACKAAGIVAPTMLVCGDDLVVISESQGTEEDERNLRAFTEAMTRYSAPPGDPPRPEYDLELITSCSSNVSVALGPRGNRRYYLTRDPTTPIARAAWETVRHSPVNSWLGNIIQYAPTIWVRMVLMTHFYSILMAQDTLDQNLNFEMYGAVYSVSPLDLPAIIEKLHGLDAFSLHTYSPNELTRVASALRKLGAPPLRAWKSRARAVRASLISRGGRAAVCGRYLFNWAVKTKLKLTPLPEARHLDLSSWFTVGAGGGDIYHSVSRARPRLLLPSLLLLFVGVGLFLLPAR

SEQ ID NO: 93 - protein, 3033 aa, Artificial Sequence
  synthetic polypeptide: J6/JFH-2.1 A2217S(CS/TI)
MSTNPKPQRKTKRNTNRRPQDVKFPGGGQIVGGVYLLPRRGPRLGVRATRKTSERSQPRGRRQPIPKDRRSTGKSWGKPGYPWPLYGNEGLGWAGWLLSPRGSRPSWGPNDPRHRSRNVGKVIDTLTCGFADLMGYIPVVGAPLGGVARALAHGVRVLEDGVNFATGNLPGCSFSIFLLALLSCITTPVSAAEVKNISTGYMVTNDCTNDSITWQLQAAVLHVPGCVPCEKVGNASQCWIPVSPNVAVQRPGALTQGLRTHIDMVVMSATLCSALYVGDLCGGVMLAAQMFIVSPQHHWFVQDCNCSIYPGTITGHRMAWDMMMNWSPTATMILAYAMRVPEVIIDIISGAHWGVMFGLAYFSMQGAWAKVVVILLLAAGVDARTHTVGGSAAQTTGRLTSLFDMGPRQKIQLVNTNGSWHINRTALNCNDSLHTGFIASLFYTHSFNSSGCPERMSACRSIEAFRVGWGALQYEDNVTNPEDMRPYCWHYPPRQCGVVSAKTVCGPVYCFTPSPVVVGTTDRLGAPTYTWGENETDVFLLNSTRPPLGSWFGCTWMNSSGYTKTCGAPPCRTRADFNASTDLLCPTDCFRKHPDTTYLKCGSGPWLTPRCLIDYPYRLWHYPCTVNYTIFKIRMYVGGVEHRLTAACNFTRGDRCNLEDRDRSQLSPLLHSTTEWAILPCSYSDLPALSTGLLHLHQNIVDVQFMYGLSPALTKYIVRWEWVILLFLLLADARVCACLWMLILLGQAEAALEKLVILHAASAASCNGFLYFVIFFVAAWYIKGRVVPLATYSLTGLWSFSLLLLALPQQAYAYDASVHGQIGAALLVMITLFTLTPGYKTLLGQCLWWLCYLLTLGEAMIQEWVPPMQVRGGRDGIAWAVTIFCPGVVFDITKWLLALLGPAYLLRAALTHVPYFVRAHALIRVCALVKQLAGGRYVQVALLALGRWTGTYIYDHLTPMSDWAASGLRDLAVAVEPIIFSPMEKKVIVWGAETAACGDILHGLPVSARLGQEILLGPADGYTSKGWKLLAPITAYAQQTRGLLGAIVVSMTGRDKTEQAGEIQVLSTVTQTFLGTTISGVLWTVYHGAGNKTLAGSRGPVTQMYSSAEGDLVGWPSPPGTKSMEPCTCGAVDLYLVTRNADVIPARRRGDKRGALLSPRPLSTLKGSSGGPVLCPRGHVVGIFRAAICSRGVAKSIDFIPVEAIDIVTRSPTFTDNSTPPAVPQTYQVGYLHAPTGSGKSTKVPVAYAAQGYKVLVLNPSVAATLGFGAYLAKAHGINPNIRTGVRTVTTGEAITYSTYGKFLADGGCAGGAYDIIICDECHATDATTLLGIGTVLDQAESAGVRLTVLATATPPGSITTPHPNIEEVALGQEGEIPFYGRAIPLAHIKGGRHLIFCHSKKKCDELAAALRAMGLNAVAYYRGLDVSIIPAQGDVVVVATDALMTGYTGDFDSVIDCNVAVTQVVDFSLDPTFTISTQTVPQDAVSRSQRRGRTGRGRLGIYRYVSTGERASGMFDSVTLCECYDAGAAWYDLTPAETTVRLRAYFNTPGLPVCQDHLEFWEAVFTGLTHIDAHYLSQTKQAGENFAYLTAYQATVCARAKAPPPSWDVMWKCLTRLKPTLVGPTPLLYRLGSVTNDVTFTHPVTKYIATCMQADLEVMTSTWVLAGGVLAAIAAYCLATGCVSIIGRLHVNQRTVVAPDKEVLYEAFDEMEECASRAALIEEAQRIAEMLKSKIQGLLQQASKQAQDIQPTVQASWPKVEQFWAKHMWNFISGIQYLAGLSTLPGNPAVASMMAFSAAITSPLSTSTTILLNIMGGWLASQIAPPAGATGFVVSGLVGAAIGSVGLGKVLVDILAGYGAGISGALVAFKIMSGEKPSMEDVINLLPGILSPGALVVGVICAAILRRHVGPGEGAVQWMNRLIAFASRGNHVAPTHYVTESDASQRVTQLLGSLTITSLLRRLHNWITEDCPTPCNGSWLRDVWDWVCTILTDFKNWLTSKLFPKLPGLPFISCQKGYRGDWAGTGIMVTRCPCGANISGNVRFGSMRITGPKTCMNTWQGTFPINCYTEGQCMPRPAPNFKTAIWRVAASEYAEVTRHGSYSYITGLTADNLKVPCQIPSPEFFSWVDGVQIHRFAPTPKPFFRDEVSFSVGLNSFVVGSQLPCDPEPDADVLMSMLTDPGHITAEAAARRLARGSPPSEASSSASQLSAPSLRSTSATHGTAYDVAMVDANLFMKGEVIRIESDSKVVVLDSLDPLAEEVSDVEPSIPSEYLIPKKQFPPALPAWARPDYNPPLVESWRKPDYQPPTVAGCALPPPKKTPTPPPRKRRTVRLSESAVGDILQQLAIKTFGQPPPSGGPDPPTGAGAAGSGGQTPPDEPAPSETDSVSSMPPLEGEPGDPDLELGQVEPQPPPQGGEAAPDSDSGSWSTCSEEEDSTVCCSMSYSWTGALITPCSPEEEKLPINPLSNSLLRYHNKVYCTTSRSASLRAKKVTFDRMQVLDAHYDSVLKDIKLAASKVSARSLSLEEACKLTPPHSARSKYGFGAKEVRSLSGRAVNHIKSVWKDLLEDSQTPIPTTIMAKNEVFCVNPAKGGKKAARLIVYPDLGVRVCEKMALYDVAQKLPQAVMGASYGFQYSPAQRVEFLLKAWADKKDPMGFSYDTRCFDSTVTERDIRTEEDIYLSCSLPEEARTAIHSLTERLYVGGPMFNSKGQTCGYRRCRASGVLTTSMGNTITCYVKALAACKAAGIVAPTMLVCGDDLVVISESQGTEEDERNLRAFTEAMTRYSAPPGDPPRPEYDLELITSCSSNVSVALGPRGNRRYYLTRDPTTPIARAAWETVRHSPVNSWLGNIIQYAPTIWVRMVLMTHFYSILMAQDTLDQNLNFEMYGAVYSVSPLDLPAIIEKLHGLDAFSLHTYSPNELTRVASALRKLGAPPLRAWKSRARAVRASLISRGGRAAVCGRYLFNWAVKTKLKLTPLPEARHLDLSSWFTVGAGGGDIYHSVSRARPRLLLLSLLLLFVGVGLFLLPAR

SEQ ID NO: 94 - protein, 3033 aa, Artificial Sequence
  synthetic polypeptide: J6/JFH-2.1 A2217S(TI/LP)
MSTNPKPQRKTKRNTNRRPQDVKFPGGGQIVGGVYLLPRRGPRLGVRATRKTSERSQPRGRRQPIPKDRRSTGKSWGKPGYPWPLYGNEGLGWAGWLLSPRGSRPSWGPNDPRHRSRNVGKVIDTLTCGFADLMGYIPVVGAPLGGVARALAHGVRVLEDGVNFATGNLPGCSFSIFLLALLSCITTPVSAAEVKNISTGYMVTNDCTNDSITWQLQAAVLHVPGCVPCEKVGNASQCWIPVSPNVAVQRPGALTQGLRTHIDMVVMSATLCSALYVGDLCGGVMLAAQMFIVSPQHHWFVQDCNCSIYPGTITGHRMAWDMMMNWSPTATMILAYAMRVPEVIIDIISGAHWGVMFGLAYFSMQGAWAKVVVILLLAAGVDARTHTVGGSAAQTTGRLTSLFDMGPRQKIQLVNTNGSWHINRTALNCNDSLHTGFIASLFYTHSFNSSGCPERMSACRSIEAFRVGWGALQYEDNVTNPEDMRPYCWHYPPRQCGVVSAKTVCGPVYCFTPSPVVVGTTDRLGAPTYTWGENETDVFLLNSTRPPLGSWFGCTWMNSSGYTKTCGAPPCRTRADFNASTDLLCPTDCFRKHPDTTYLKCGSGPWLTPRCLIDYPYRLWHYPCTVNYTIFKIRMYVGGVEHRLTAACNFTRGDRCNLEDRDRSQLSPLLHSTTEWAILPCSYSDLPALSTGLLHLHQNIVDVQFMYGLSPALTKYIVRWEWVILLFLLLADARVCACLWMLILLGQAEAALEKLVILHAASAASCNGFLYFVIFFVAAWYIKGRVVPLATYSLTGLWSFSLLLLALPQQAYAYDASVHGQIGAALLVMITLFTLTPGYKTLLGQCLWWLCYLLTLGEAMIQEWVPPMQVRGGRDGIAWAVTIFCPGVVFDITKWLLALLGPAYLLRAALTHVPYFVRAHALIRVCALVKQLAGGRYVQVALLALGRWTGTYIYDHLTPMSDWAASGLRDLAVAVEPIIFSPMEKKVIVWGAETAACGDILHGLPVSARLGQEILLGPADGYTSKGWKLLAPITAYAQQTRGLLGAIVVSMTGRDKTEQAGEIQVLSTVTQTFLGTTISGVLWTVYHGAGNKTLAGSRGPVTQMYSSAEGDLVGWPSPPGTKSMEPCTCGAVDLYLVTRNADVIPARRRGDKRGALLSPRPLSTLKGSSGGPVLCPRGHVVGIFRAAICSRGVAKSIDFIPVEAIDIVTRSPTFTDNSTPPAVPQTYQVGYLHAPTGSGKSTKVPVAYAAQGYKVLVLNPSVAATLGFGAYLAKAHGINPNIRTGVRTVTTGEAITYSTYGKFLADGGCAGGAYDIIICDECHATDATTLLGIGTVLDQAESAGVRLTVLATATPPGSITTPHPNIEEVALGQEGEIPFYGRAIPLAHIKGGRHLIFCHSKKKCDELAAALRAMGLNAVAYYRGLDVSIIPAQGDVVVVATDALMTGYTGDFDSVIDCNVAVTQVVDFSLDPTFTISTQTVPQDAVSRSQRRGRTGRGRLGIYRYVSTGERASGMFDSVTLCECYDAGAAWYDLTPAETTVRLRAYFNTPGLPVCQDHLEFWEAVFTGLTHIDAHYLSQTKQAGENFAYLTAYQATVCARAKAPPPSWDVMWKCLTRLKPTLVGPTPLLYRLGSVTNDVTFTHPVTKYIATCMQADLEVMTSTWVLAGGVLAAIAAYCLATGCVSIIGRLHVNQRTVVAPDKEVLYEAFDEMEECASRAALIEEAQRIAEMLKSKIQGLLQQASKQAQDIQPTVQASWPKVEQFWAKHMWNFISGIQYLAGLSTLPGNPAVASMMAFSAAITSPLSTSTTILLNIMGGWLASQIAPPAGATGFVVSGLVGAAIGSVGLGKVLVDILAGYGAGISGALVAFKIMSGEKPSMEDVINLLPGILSPGALVVGVICAAILRRHVGPGEGAVQWMNRLIAFASRGNHVAPTHYVTESDASQRVTQLLGSLTITSLLRRLHNWITEDCPTPCNGSWLRDVWDWVCTILTDFKNWLTSKLFPKLPGLPFISCQKGYRGDWAGTGIMVTRCPCGANISGNVRFGSMRITGPKTCMNTWQGTFPINCYTEGQCMPRPAPNFKTAIWRVAASEYAEVTRHGSYSYITGLTADNLKVPCQIPSPEFFSWVDGVQIHRFAPTPKPFFRDEVSFSVGLNSFVVGSQLPCDPEPDADVLMSMLTDPGHITAEAAARRLARGSPPSEASSSASQLSAPSLRSTCATHGTAYDVAMVDANLFMKGEVIRIESDSKVVVLDSLDPLAEEVSDVEPSIPSEYLIPKKQFPPALPAWARPDYNPPLVESWRKPDYQPPTVAGCALPPPKKTPTPPPRKRRTVRLSESAVGDILQQLAIKTFGQPPPSGGPDPPTGAGAAGSGGQTPPDEPAPSETDSVSSMPPLEGEPGDPDLELGQVEPQPPPQGGEAAPDSDSGSWSTCSEEEDSTVCCSMSYSWTGALITPCSPEEEKLPINPLSNSLLRYHNKVYCTTSRSASLRAKKVTFDRMQVLDAHYDSVLKDIKLAASKVSARSLSLEEACKLTPPHSARSKYGFGAKEVRSLSGRAVNHIKSVWKDLLEDSQTPIPTTIMAKNEVFCVNPAKGGKKAARLIVYPDLGVRVCEKMALYDVAQKLPQAVMGASYGFQYSPAQRVEFLLKAWADKKDPMGFSYDTRCFDSTVTERDIRTEEDIYLSCSLPEEARTAIHSLTERLYVGGPMFNSKGQTCGYRRCRASGVLTTSMGNTITCYVKALAACKAAGIVAPTMLVCGDDLVVISESQGTEEDERNLRAFTEAMTRYSAPPGDPPRPEYDLELITSCSSNVSVALGPRGNRRYYLTRDPTTPIARAAWETVRHSPVNSWLGNIIQYAPTIWVRMVLMTHFYSILMAQDTLDQNLNFEMYGAVYSVSPLDLPAIIEKLHGLDAFSLHTYSPNELTRVASALRKLGAPPLRAWKSRARAVRASLISRGGRAAVCGRYLFNWAVKTKLKLTPLPEARHLDLSSWFTVGAGGGDIYHSVSRARPRLLLPSLLLLFVGVGLFLLPAR

SEQ ID NO: 95 - protein, 3033 aa, Artificial Sequence
  synthetic polypeptide: J6/JFH-2.1 A2217S(CS/TI/LP)
MSTNPKPQRKTKRNTNRRPQDVKFPGGGQIVGGVYLLPRRGPRLGVRATRKTSERSQPRGRRQPIPKDRRSTGKSWGKPGYPWPLYGNEGLGWAGWLLSPRGSRPSWGPNDPRHRSRNVGKVIDTLTCGFADLMGYIPVVGAPLGGVARALAHGVRVLEDGVNFATGNLPGCSFSIFLLALLSCITTPVSAAEVKNISTGYMVTNDCTNDSITWQLQAAVLHVPGCVPCEKVGNASQCWIPVSPNVAVQRPGALTQGLRTHIDMVVMSATLCSALYVGDLCGGVMLAAQMFIVSPQHHWFVQDCNCSIYPGTITGHRMAWDMMMNWSPTATMILAYAMRVPEVIIDIISGAHWGVMFGLAYFSMQGAWAKVVVILLLAAGVDARTHTVGGSAAQTTGRLTSLFDMGPRQKIQLVNTNGSWHINRTALNCNDSLHTGFIASLFYTHSFNSSGCPERMSACRSIEAFRVGWGALQYEDNVTNPEDMRPYCWHYPPRQCGVVSAKTVCGPVYCFTPSPVVVGTTDRLGAPTYTWGENETDVFLLNSTRPPLGSWFGCTWMNSSGYTKTCGAPPCRTRADFNASTDLLCPTDCFRKHPDTTYLKCGSGPWLTPRCLIDYPYRLWHYPCTVNYTIFKIRMYVGGVEHRLTAACNFTRGDRCNLEDRDRSQLSPLLHSTTEWAILPCSYSDLPALSTGLLHLHQNIVDVQFMYGLSPALTKYIVRWEWVILLFLLLADARVCACLWMLILLGQAEAALEKLVILHAASAASCNGFLYFVIFFVAAWYIKGRVVPLATYSLTGLWSFSLLLLALPQQAYAYDASVHGQIGAALLVMITLFTLTPGYKTLLGQCLWWLCYLLTLGEAMIQEWVPPMQVRGGRDGIAWAVTIFCPGVVFDITKWLLALLGPAYLLRAALTHVPYFVRAHALIRVCALVKQLAGGRYVQVALLALGRWTGTYIYDHLTPMSDWAASGLRDLAVAVEPIIFSPMEKKVIVWGAETAACGDILHGLPVSARLGQEILLGPADGYTSKGWKLLAPITAYAQQTRGLLGAIVVSMTGRDKTEQAGEIQVLSTVTQTFLGTTISGVLWTVYHGAGNKTLAGSRGPVTQMYSSAEGDLVGWPSPPGTKSMEPCTCGAVDLYLVTRNADVIPARRRGDKRGALLSPRPLSTLKGSSGGPVLCPRGHVVGIFRAAICSRGVAKSIDFIPVEAIDIVTRSPTFTDNSTPPAVPQTYQVGYLHAPTGSGKSTKVPVAYAAQGYKVLVLNPSVAATLGFGAYLAKAHGINPNIRTGVRTVTTGEAITYSTYGKFLADGGCAGGAYDIIICDECHATDATTLLGIGTVLDQAESAGVRLTVLATATPPGSITTPHPNIEEVALGQEGEIPFYGRAIPLAHIKGGRHLIFCHSKKKCDELAAALRAMGLNAVAYYRGLDVSIIPAQGDVVVVATDALMTGYTGDFDSVIDCNVAVTQVVDFSLDPTFTISTQTVPQDAVSRSQRRGRTGRGRLGIYRYVSTGERASGMFDSVTLCECYDAGAAWYDLTPAETTVRLRAYFNTPGLPVCQDHLEFWEAVFTGLTHIDAHYLSQTKQAGENFAYLTAYQATVCARAKAPPPSWDVMWKCLTRLKPTLVGPTPLLYRLGSVTNDVTFTHPVTKYIATCMQADLEVMTSTWVLAGGVLAAIAAYCLATGCVSIIGRLHVNQRTVVAPDKEVLYEAFDEMEECASRAALIEEAQRIAEMLKSKIQGLLQQASKQAQDIQPTVQASWPKVEQFWAKHMWNFISGIQYLAGLSTLPGNPAVASMMAFSAAITSPLSTSTTILLNIMGGWLASQIAPPAGATGFVVSGLVGAAIGSVGLGKVLVDILAGYGAGISGALVAFKIMSGEKPSMEDVINLLPGILSPGALVVGVICAAILRRHVGPGEGAVQWMNRLIAFASRGNHVAPTHYVTESDASQRVTQLLGSLTITSLLRRLHNWITEDCPTPCNGSWLRDVWDWVCTILTDFKNWLTSKLFPKLPGLPFISCQKGYRGDWAGTGIMVTRCPCGANISGNVRFGSMRITGPKTCMNTWQGTFPINCYTEGQCMPRPAPNFKTAIWRVAASEYAEVTRHGSYSYITGLTADNLKVPCQIPSPEFFSWVDGVQIHRFAPTPKPFFRDEVSFSVGLNSFVVGSQLPCDPEPDADVLMSMLTDPGHITAEAAARRLARGSPPSEASSSASQLSAPSLRSTSATHGTAYDVAMVDANLFMKGEVIRIESDSKVVVLDSLDPLAEEVSDVEPSIPSEYLIPKKQFPPALPAWARPDYNPPLVESWRKPDYQPPTVAGCALPPPKKTPTPPPRKRRTVRLSESAVGDILQQLAIKTFGQPPPSGGPDPPTGAGAAGSGGQTPPDEPAPSETDSVSSMPPLEGEPGDPDLELGQVEPQPPPQGGEAAPDSDSGSWSTCSEEEDSTVCCSMSYSWTGALITPCSPEEEKLPINPLSNSLLRYHNKVYCTTSRSASLRAKKVTFDRMQVLDAHYDSVLKDIKLAASKVSARSLSLEEACKLTPPHSARSKYGFGAKEVRSLSGRAVNHIKSVWKDLLEDSQTPIPTTIMAKNEVFCVNPAKGGKKAARLIVYPDLGVRVCEKMALYDVAQKLPQAVMGASYGFQYSPAQRVEFLLKAWADKKDPMGFSYDTRCFDSTVTERDIRTEEDIYLSCSLPEEARTAIHSLTERLYVGGPMFNSKGQTCGYRRCRASGVLTTSMGNTITCYVKALAACKAAGIVAPTMLVCGDDLVVISESQGTEEDERNLRAFTEAMTRYSAPPGDPPRPEYDLELITSCSSNVSVALGPRGNRRYYLTRDPTTPIARAAWETVRHSPVNSWLGNIIQYAPTIWVRMVLMTHFYSILMAQDTLDQNLNFEMYGAVYSVSPLDLPAIIEKLHGLDAFSLHTYSPNELTRVASALRKLGAPPLRAWKSRARAVRASLISRGGRAAVCGRYLFNWAVKTKLKLTPLPEARHLDLSSWFTVGAGGGDIYHSVSRARPRLLLPSLLLLFVGVGLFLLPAR

SEQ ID NO: 96 - protein, 3033 aa, Artificial Sequence
  synthetic polypeptide: J6/JFH-2.1 A2217S(AT/CS/TI/LP)
MSTNPKPQRKTKRNTNRRPQDVKFPGGGQIVGGVYLLPRRGPRLGVRATRKTSERSQPRGRRQPIPKDRRSTGKSWGKPGYPWPLYGNEGLGWAGWLLSPRGSRPSWGPNDPRHRSRNVGKVIDTLTCGFADLMGYIPVVGAPLGGVTRALAHGVRVLEDGVNFATGNLPGCSFSIFLLALLSCITTPVSAAEVKNISTGYMVTNDCTNDSITWQLQAAVLHVPGCVPCEKVGNASQCWIPVSPNVAVQRPGALTQGLRTHIDMVVMSATLCSALYVGDLCGGVMLAAQMFIVSPQHHWFVQDCNCSIYPGTITGHRMAWDMMMNWSPTATMILAYAMRVPEVIIDIISGAHWGVMFGLAYFSMQGAWAKVVVILLLAAGVDARTHTVGGSAAQTTGRLTSLFDMGPRQKIQLVNTNGSWHINRTALNCNDSLHTGFIASLFYTHSFNSSGCPERMSACRSIEAFRVGWGALQYEDNVTNPEDMRPYCWHYPPRQCGVVSAKTVCGPVYCFTPSPVVVGTTDRLGAPTYTWGENETDVFLLNSTRPPLGSWFGCTWMNSSGYTKTCGAPPCRTRADFNASTDLLCPTDCFRKHPDTTYLKCGSGPWLTPRCLIDYPYRLWHYPCTVNYTIFKIRMYVGGVEHRLTAACNFTRGDRCNLEDRDRSQLSPLLHSTTEWAILPCSYSDLPALSTGLLHLHQNIVDVQFMYGLSPALTKYIVRWEWVILLFLLLADARVCACLWMLILLGQAEAALEKLVILHAASAASCNGFLYFVIFFVAAWYIKGRVVPLATYSLTGLWSFSLLLLALPQQAYAYDASVHGQIGAALLVMITLFTLTPGYKTLLGQCLWWLCYLLTLGEAMIQEWVPPMQVRGGRDGIAWAVTIFCPGVVFDITKWLLALLGPAYLLRAALTHVPYFVRAHALIRVCALVKQLAGGRYVQVALLALGRWTGTYIYDHLTPMSDWAASGLRDLAVAVEPIIFSPMEKKVIVWGAETAACGDILHGLPVSARLGQEILLGPADGYTSKGWKLLAPITAYAQQTRGLLGAIVVSMTGRDKTEQAGEIQVLSTVTQTFLGTTISGVLWTVYHGAGNKTLAGSRGPVTQMYSSAEGDLVGWPSPPGTKSMEPCTCGAVDLYLVTRNADVIPARRRGDKRGALLSPRPLSTLKGSSGGPVLCPRGHVVGIFRAAICSRGVAKSIDFIPVEAIDIVTRSPTFTDNSTPPAVPQTYQVGYLHAPTGSGKSTKVPVAYAAQGYKVLVLNPSVAATLGFGAYLAKAHGINPNIRTGVRTVTTGEAITYSTYGKFLADGGCAGGAYDIIICDECHATDATTLLGIGTVLDQAESAGVRLTVLATATPPGSITTPHPNIEEVALGQEGEIPFYGRAIPLAHIKGGRHLIFCHSKKKCDELAAALRAMGLNAVAYYRGLDVSIIPAQGDVVVVATDALMTGYTGDFDSVIDCNVAVTQVVDFSLDPTFTISTQTVPQDAVSRSQRRGRTGRGRLGIYRYVSTGERASGMFDSVTLCECYDAGAAWYDLTPAETTVRLRAYFNTPGLPVCQDHLEFWEAVFTGLTHIDAHYLSQTKQAGENFAYLTAYQATVCARAKAPPPSWDVMWKCLTRLKPTLVGPTPLLYRLGSVTNDVTFTHPVTKYIATCMQADLEVMTSTWVLAGGVLAAIAAYCLATGCVSIIGRLHVNQRTVVAPDKEVLYEAFDEMEECASRAALIEEAQRIAEMLKSKIQGLLQQASKQAQDIQPTVQASWPKVEQFWAKHMWNFISGIQYLAGLSTLPGNPAVASMMAFSAAITSPLSTSTTILLNIMGGWLASQIAPPAGATGFVVSGLVGAAIGSVGLGKVLVDILAGYGAGISGALVAFKIMSGEKPSMEDVINLLPGILSPGALVVGVICAAILRRHVGPGEGAVQWMNRLIAFASRGNHVAPTHYVTESDASQRVTQLLGSLTITSLLRRLHNWITEDCPTPCNGSWLRDVWDWVCTILTDFKNWLTSKLFPKLPGLPFISCQKGYRGDWAGTGIMVTRCPCGANISGNVRFGSMRITGPKTCMNTWQGTFPINCYTEGQCMPRPAPNFKTAIWRVAASEYAEVTRHGSYSYITGLTADNLKVPCQIPSPEFFSWVDGVQIHRFAPTPKPFFRDEVSFSVGLNSFVVGSQLPCDPEPDADVLMSMLTDPGHITAEAAARRLARGSPPSEASSSASQLSAPSLRSTSATHGTAYDVAMVDANLFMKGEVIRIESDSKVVVLDSLDPLAEEVSDVEPSIPSEYLIPKKQFPPALPAWARPDYNPPLVESWRKPDYQPPTVAGCALPPPKKTPTPPPRKRRTVRLSESAVGDILQQLAIKTFGQPPPSGGPDPPTGAGAAGSGGQTPPDEPAPSETDSVSSMPPLEGEPGDPDLELGQVEPQPPPQGGEAAPDSDSGSWSTCSEEEDSTVCCSMSYSWTGALITPCSPEEEKLPINPLSNSLLRYHNKVYCTTSRSASLRAKKVTFDRMQVLDAHYDSVLKDIKLAASKVSARSLSLEEACKLTPPHSARSKYGFGAKEVRSLSGRAVNHIKSVWKDLLEDSQTPIPTTIMAKNEVFCVNPAKGGKKAARLIVYPDLGVRVCEKMALYDVAQKLPQAVMGASYGFQYSPAQRVEFLLKAWADKKDPMGFSYDTRCFDSTVTERDIRTEEDIYLSCSLPEEARTAIHSLTERLYVGGPMFNSKGQTCGYRRCRASGVLTTSMGNTITCYVKALAACKAAGIVAPTMLVCGDDLVVISESQGTEEDERNLRAFTEAMTRYSAPPGDPPRPEYDLELITSCSSNVSVALGPRGNRRYYLTRDPTTPIARAAWETVRHSPVNSWLGNIIQYAPTIWVRMVLMTHFYSILMAQDTLDQNLNFEMYGAVYSVSPLDLPAIIEKLHGLDAFSLHTYSPNELTRVASALRKLGAPPLRAWKSRARAVRASLISRGGRAAVCGRYLFNWAVKTKLKLTPLPEARHLDLSSWFTVGAGGGDIYHSVSRARPRLLLPSLLLLFVGVGLFLLPAR

SEQ ID NO: 97 - protein, 3033 aa, Artificial Sequence
  synthetic polypeptide: J6/JFH-2.1 A2217S(TI/MT/MK/NT/IV/SG/TA)
MSTNPKPQRKTKRNTNRRPQDVKFPGGGQIVGGVYLLPRRGPRLGVRATRKTSERSQPRGRRQPIPKDRRSTGKSWGKPGYPWPLYGNEGLGWAGWLLSPRGSRPSWGPNDPRHRSRNVGKVIDTLTCGFADLMGYIPVVGAPLGGVARALAHGVRVLEDGVNFATGNLPGCSFSIFLLALLSCITTPVSAAEVKNISTGYMVTNDCTNDSITWQLQAAVLHVPGCVPCEKVGNASQCWIPVSPNVAVQRPGALTQGLRTHIDMVVMSATLCSALYVGDLCGGVMLAAQMFIVSPQHHWFVQDCNCSIYPGTITGHRMAWDMMMNWSPTATMILAYAMRVPEVIIDIISGAHWGVMFGLAYFSMQGAWAKVVVILLLAAGVDARTHTVGGSAAQTTGRLTSLFDKGPRQKIQLVNTTGSWHINRTALNCNDSLHTGFIASLFYTHSFNSSGCPERMSACRSIEAFRVGWGALQYEDNVTNPEDMRPYCWHYPPRQCGVVSAKTVCGPVYCFTPSPVVVGTTDRLGAPTYTWGENETDVFLLNSTRPPLGSWFGCTWMNSSGYTKTCGAPPCRTRADFNASTDLLCPTDCFRKHPDTTYLKCGSGPWLTPRCLIDYPYRLWHYPCTVNYTIFKIRMYVGGVEHRLTAACNFTRGDRCNLEDRDRSQLSPLLHSTTEWAILPCSYSDLPALSTGLLHLHQNIVDVQFMYGLSPALTKYIVRWEWVILLFLLLADARVCACLWMLILLGQAEAALEKLVILHAASAASCNGFLYFVIFFVAAWYIKGRVVPLATYSLTGLWSFSLLLLALPQQAYAYDASVHGQIGAALLVMITLFTLTPGYKTLLGQCLWWLCYLLTLGEAMIQEWVPPTQVRGGRDGIAWAVTIFCPGVVFDITKWLLALLGPAYLLRAALTHVPYFVRAHALIRVCALVKQLAGGRYVQVALLALGRWTGTYIYDHLTPMSDWAASGLRDLAVAVEPIIFSPMEKKVIVWGAETAACGDILHGLPVSARLGQEILLGPADGYTSKGWKLLAPITAYAQQTRGLLGAIVVSMTGRDKTEQAGEIQVLSTVTQTFLGTTISGVLWTVYHGAGNKTLAGSRGPVTQMYSSAEGDLVGWPSPPGTKSMEPCTCGAVDLYLVTRNADVIPARRRGDKRGALLSPRPLSTLKGSSGGPVLCPRGHVVGIFRAAICSRGVAKSIDFIPVEAIDIVTRSPTFTDNSTPPAVPQTYQVGYLHAPTGSGKSTKVPVAYAAQGYKVLVLNPSVAATLGFGAYLAKAHGINPNIRTGVRTVTTGEAITYSTYGKFLADGGCAGGAYDIIICDECHATDATTLLGIGTVLDQAESAGVRLTVLATATPPGSITTPHPNIEEVALGQEGEIPFYGRAIPLAHIKGGRHLIFCHSKKKCDELAAALRAMGLNAVAYYRGLDVSIIPAQGDVVVVATDALMTGYTGDFDSVIDCNVAVTQVVDFSLDPTFTISTQTVPQDAVSRSQRRGRTGRGRLGIYRYVSTGERASGMFDSVTLCECYDAGAAWYDLTPAETTVRLRAYFNTPGLPVCQDHLEFWEAVFTGLTHIDAHYLSQTKQAGENFAYLTAYQATVCARAKAPPPSWDVMWKCLTRLKPTLVGPTPLLYRLGSVTNDVTFAHPVTKYIATCMQADLEVMTSTWVLAGGVLAAIAAYCLATGCVSIIGRLHVNQRTVVAPDKEVLYEAFDEMEECASRAALVEEAQRIAEMLKSKIQGLLQQASKQAQDIQPTVQASWPKVEQFWAKHMWNFISGIQYLAGLSTLPGNPAVASMMAFSAAITSPLSTSTTILLNIMGGWLASQIAPPAGATGFVVSGLVGAAIGSVGLGKVLVDILAGYGAGISGALVAFKIMSGEKPSMEDVINLLPGILSPGALVVGVICAAILRRHVGPGEGAVQWMNRLIAFASRGNHVAPTHYVTESDASQRVTQLLGSLTITSLLRRLHNWITEDCPTPCNGSWLRDVWDWVCTILTDFKNWLTSKLFPKLPGLPFISCQKGYRGDWAGTGIMVTRCPCGANISGNVRFGSMRITGPKTCMNTWQGTFPINCYTEGQCMPRPAPNFKTAIWRVAASEYAEVTRHGSYSYITGLTADNLKVPCQIPSPEFFSWVDGVQIHRFAPTPKPFFRDEVSFSVGLNSFVVGSQLPCDPEPDADVLMSMLTDPGHITAEAAARRLARGSPPSEAGSSASQLSAPSLRSTCATHGTAYDVAMVDANLFMKGEVIRIESDSKVVVLDSLDPLAEEVSDVEPSIPSEYLIPKKQFPPALPAWARPDYNPPLVESWRKPDYQPPTVAGCALPPPKKTPTPPPRKRRTVRLSESAVGDILQQLAIKTFGQPPPSGGPDPPTGAGAAGSGGQTPPDEPAPSETDSVSSMPPLEGEPGDPDLELGQVEPQPPPQGGEAAPDSDSGSWSTCSEEEDSTVCCSMSYSWTGALITPCSPEEEKLPINPLSNSLLRYHNKVYCTTSRSASLRAKKVTFDRMQVLDAHYDSVLKDIKLAASKVSARSLSLEEACKLTPPHSARSKYGFGAKEVRSLSGRAVNHIKSVWKDLLEDSQTPIPTTIMAKNEVFCVNPAKGGKKAARLIVYPDLGVRVCEKMALYDVAQKLPQAVMGASYGFQYSPAQRVEFLLKAWADKKDPMGFSYDTRCFDSTVTERDIRTEEDIYLSCSLPEEARTAIHSLTERLYVGGPMFNSKGQTCGYRRCRASGVLTTSMGNTITCYVKALAACKAAGIVAPTMLVCGDDLVVISESQGTEEDERNLRAFTEAMTRYSAPPGDPPRPEYDLELITSCSSNVSVALGPRGNRRYYLTRDPTTPIARAAWETVRHSPVNSWLGNIIQYAPTIWVRMVLMTHFYSILMAQDTLDQNLNFEMYGAVYSVSPLDLPAIIEKLHGLDAFSLHTYSPNELTRVASALRKLGAPPLRAWKSRARAVRASLISRGGRAAVCGRYLFNWAVKTKLKLTPLPEARHLDLSSWFTVGAGGGDIYHSVSRARPRLLLLSLLLLFVGVGLFLLPAR

SEQ ID NO: 98 - protein, 3033 aa, Artificial Sequence
  synthetic polypeptide: J6/JFH-2.1 A2217S(AT/CS/TI/LP/MV/VG/IV/KR)
MSTNPKPQRKTKRNTNRRPQDVKFPGGGQIVGGVYLLPRRGPRLGVRATRKTSERSQPRGRRQPIPKDRRSTGKSWGKPGYPWPLYGNEGLGWAGWLLSPRGSRPSWGPNDPRHRSRNVGKVIDTLTCGFADLMGYIPVVGAPLGGVTRALAHGVRVLEDGVNFATGNLPGCSFSIFLLALLSCITTPVSAAEVKNISTGYMVTNDCTNDSITWQLQAAVLHVPGCVPCEKVGNASQCWIPVSPNVAVQRPGALTQGLRTHIDMVVMSATLCSALYVGDLCGGVMLAAQMFIVSPQHHWFVQDCNCSIYPGTITGHRMAWDMMMNWSPTATMILAYAMRVPEVIIDIISGAHWGVVFGLAYFSMQGAWAKVVVILLLAAGVDARTHTVGGSAAQTTGRLTSLFDMGPRQKIQLVNTNGSWHINRTALNCNDSLHTGFIASLFYTHSFNSSGCPERMSACRSIEAFRVGWGALQYEDNVTNPEDMRPYCWHYPPRQCGVVSAKTVCGPVYCFTPSPVVVGTTDRLGAPTYTWGENETDVFLLNSTRPPLGSWFGCTWMNSSGYTKTCGAPPCRTRADFNASTDLLCPTDCFRKHPDTTYLKCGSGPWLTPRCLIDYPYRLWHYPCTGNYTIFKIRMYVGGVEHRLTAACNFTRGDRCNLEDRDRSQLSPLLHSTTEWAILPCSYSDLPALSTGLLHLHQNIVDVQFMYGLSPALTKYIVRWEWVILLFLLLADARVCACLWMLILLGQAEAALEKLVILHAASAASCNGFLYFVIFFVAAWYIKGRVVPLATYSLTGLWSFSLLLLALPQQAYAYDASVHGQIGAALLVMITLFTLTPGYKTLLGQCLWWLCYLLTLGEAMIQEWVPPMQVRGGRDGIAWAVTIFCPGVVFDITKWLLALLGPAYLLRAALTHVPYFVRAHALIRVCALVKQLAGGRYVQVALLALGRWTGTYIYDHLTPMSDWAASGLRDLAVAVEPIIFSPMEKKVIVWGAETAACGDILHGLPVSARLGQEILLGPADGYTSKGWKLLAPITAYAQQTRGLLGAIVVSMTGRDKTEQAGEIQVLSTVTQTFLGTTISGVLWTVYHGAGNKTLAGSRGPVTQMYSSAEGDLVGWPSPPGTKSMEPCTCGAVDLYLVTRNADVIPARRRGDKRGALLSPRPLSTLKGSSGGPVLCPRGHVVGIFRAAICSRGVAKSIDFIPVEAIDIVTRSPTFTDNSTPPAVPQTYQVGYLHAPTGSGKSTKVPVAYAAQGYKVLVLNPSVAATLGFGAYLAKAHGINPNIRTGVRTVTTGEAITYSTYGKFLADGGCAGGAYDIIICDECHATDATTLLGIGTVLDQAESAGVRLTVLATATPPGSITTPHPNIEEVALGQEGEIPFYGRAIPLAHIKGGRHLIFCHSKKKCDELAAALRAMGLNAVAYYRGLDVSIIPAQGDVVVVATDALMTGYTGDFDSVIDCNVAVTQVVDFSLDPTFTISTQTVPQDAVSRSQRRGRTGRGRLGIYRYVSTGERASGMFDSVTLCECYDAGAAWYDLTPAETTVRLRAYFNTPGLPVCQDHLEFWEAVFTGLTHIDAHYLSQTKQAGENFAYLTAYQATVCARAKAPPPSWDVMWKCLTRLKPTLVGPTPLLYRLGSVTNDVTFTHPVTKYIATCMQADLEVMTSTWVLAGGVLAAIAAYCLATGCVSIVGRLHVNQRTVVAPDKEVLYEAFDEMEECASRAALIEEAQRIAEMLKSKIQGLLQQASKQAQDIQPTVQASWPKVEQFWARHMWNFISGIQYLAGLSTLPGNPAVASMMAFSAAITSPLSTSTTILLNIMGGWLASQIAPPAGATGFVVSGLVGAAIGSVGLGKVLVDILAGYGAGISGALVAFKIMSGEKPSMEDVINLLPGILSPGALVVGVICAAILRRHVGPGEGAVQWMNRLIAFASRGNHVAPTHYVTESDASQRVTQLLGSLTITSLLRRLHNWITEDCPTPCNGSWLRDVWDWVCTILTDFKNWLTSKLFPKLPGLPFISCQKGYRGDWAGTGIMVTRCPCGANISGNVRFGSMRITGPKTCMNTWQGTFPINCYTEGQCMPRPAPNFKTAIWRVAASEYAEVTRHGSYSYITGLTADNLKVPCQIPSPEFFSWVDGVQIHRFAPTPKPFFRDEVSFSVGLNSFVVGSQLPCDPEPDADVLMSMLTDPGHITAEAAARRLARGSPPSEASSSASQLSAPSLRSTSATHGTAYDVAMVDANLFMKGEVIRIESDSKVVVLDSLDPLAEEVSDVEPSIPSEYLIPKKQFPPALPAWARPDYNPPLVESWRKPDYQPPTVAGCALPPPKKTPTPPPRKRRTVRLSESAVGDILQQLAIKTFGQPPPSGGPDPPTGAGAAGSGGQTPPDEPAPSETDSVSSMPPLEGEPGDPDLELGQVEPQPPPQGGEAAPDSDSGSWSTCSEEEDSTVCCSMSYSWTGALITPCSPEEEKLPINPLSNSLLRYHNKVYCTTSRSASLRAKKVTFDRMQVLDAHYDSVLKDIKLAASKVSARSLSLEEACKLTPPHSARSKYGFGAKEVRSLSGRAVNHIKSVWKDLLEDSQTPIPTTIMAKNEVFCVNPAKGGKKAARLIVYPDLGVRVCEKMALYDVAQKLPQAVMGASYGFQYSPAQRVEFLLKAWADKKDPMGFSYDTRCFDSTVTERDIRTEEDIYLSCSLPEEARTAIHSLTERLYVGGPMFNSKGQTCGYRRCRASGVLTTSMGNTITCYVKALAACKAAGIVAPTMLVCGDDLVVISESQGTEEDERNLRAFTEAMTRYSAPPGDPPRPEYDLELITSCSSNVSVALGPRGNRRYYLTRDPTTPIARAAWETVRHSPVNSWLGNIIQYAPTIWVRMVLMTHFYSILMAQDTLDQNLNFEMYGAVYSVSPLDLPAIIEKLHGLDAFSLHTYSPNELTRVASALRKLGAPPLRAWKSRARAVRASLISRGGRAAVCGRYLFNWAVKTKLKLTPLPEARHLDLSSWFTVGAGGGDIYHSVSRARPRLLLPSLLLLFVGVGLFLLPAR
